(19) United States
(12) Patent Application Publication
(10) Pub. No.: US 2006/0247193 A1
(43) Pub. Date: Nov. 2, 2006

(54) Regulation of gene expression by dna interference

(75) Inventors: Kazunari Taira, Ibaraki (JP); Hiroaki Kawasaki, Tokyo (JP)

Correspondence Address: FOLEY AND LARDNER LLP;SUITE 500, 3000 K STREET NW, WASHINGTON, DC, 20007, US

(73) Assignee: NATIONAL INSTITUTE OF ADVANCED INDUSTRIAL SCIENCE AND TECHNOLOGY

(21) Appl. No.: 10/544,761

(22) PCT Filed: Feb. 10, 2004
(86) PCT No.: PCT/JP04/01433

§ 371 Date: Apr. 4, 2006

Related U.S. Application Data
(60) Provisional application No. 60/445,829, filed on Feb. 10, 2003.

(51) Int. Cl. A61K 48/00; C12N 15/09

(52) U.S. Cl. 514/44; 435/455

(57) ABSTRACT

The present invention provides products and methods for modulating expression of a target gene in a cell. One such method includes introducing into the cell a polynucleotide that forms a duplex region with an mRNA transcribed from said target gene, where the duplex region comprises a mammalian miRNA target region. Another such method includes introducing into the cell an siRNA that forms a duplex region with an miRNA, or precursor thereof, where an mRNA transcribed from the target gene comprises a miRNA target region. In certain preferred embodiments, the methods further include measuring expression of the target gene. The methods are particularly useful for modulating ontogenesis, function, differentiation and/or viability of a mammalian cell. As such, the invention also provides methods for controlling ontogenesis of mammal, function of mammalian cell, differentiation of mammalian cell or viability of mammalian cell in the post-transcriptional phase by introducing into the cell a miRNA or a siRNA silencing precursor to the miRNA. The invention additionally provides polynucleotides, including vectors, useful in the method of the instant invention. The provided polynucleotides include a plasmid vector comprising a promoter and a polynucleotide sequence expressing miRNA or precursor to the miRNA. Also included is a plasmid vector comprising a promoter and a nucleotide sequence expressing siRNA silencing precursor to miRNA. In certain preferred embodiments, the mRNA is capable of forming a duplex region with an mRNA transcribed from a mammalian target gene.

### RELATED APPLICATIONS

[0001] This application claims the benefit of U.S. Provisional Application No. 60/445,829, filed Feb. 10, 2003, the entirety of which is herein incorporated by reference.

### FIELD OF THE INVENTION

[0002] The invention relates to processes for modulating gene expression in mammalian cells as well as to products and compositions useful in such methods. The methods and compositions are useful, by way of example, for controlling ontogenesis, function, differentiation and/or viability of a mammalian cell.

### BACKGROUND OF THE INVENTION

[0003] Noncoding RNAs including rRNA, snRNA, snoRNA and tRNA have roles in a great variety of processes such as chromosome maintenance, gene imprinting, transcriptional regulation, pre-mRNA splicing and the control of mRNA translation¹. One class of the noncoding RNAs called microRNAs (mRNAs) is small RNAs that are known to regulate mRNA at a post-transcriptional level²⁻¹⁸. To date, a large number of miRNAs has been discovered in animals and plants^{2,3,6-16}. Among them, lin-4 and let-7 are identified from the genetic analysis of developmental timing in Caenorhabditis elegans, and are well characterized²⁻⁵. Both lin-4 and let-7 act as repressors of their respective target genes, such as lin-14, lin-28, and lin41. Repression by these mRNAs requires the presence of partially complementary sequences in the 3′-untranslated regions (3′-UTRs) of the target mRNAs. Although lin-14 and lin-28 are translationally repressed by lin-4, these mRNAs were detected in association with polyribosomes^{19,20}. Thus, lin-4 regulates expression of the target genes after translational initiation.

[0004] In general, mRNAs are first transcribed as a long RNA and then processed to a pre-mRNA of approximately ˜70 nts²¹. This pre-mRNA is transported to the cytoplasm and processed by RNase III Dicer to produce the mature mRNA²¹⁻²⁴. The mature mRNA is incorporated into ribonucleoprotein complexes (miRNPs) including eIF2C2, which functions in RNA interference (RNAi)-mediated gene silencing^{9,16,25}. This mRNA-miRNPs complex represses mRNA translation by partially base-pairing to the 3′-UTR of target mRNAs^{2-5,26,27}. However, Arabidopsis thagana miR-171 and miR-165/166 are perfectly complementary to the coding region of the Scarecrow-like (SCL) family of the putative transcription factor, PHAVOLUTA (PHV) and PHABULOSA (PHB) mRNA, respectively^{17,18}. These mRNAs can induce cleavage of the mRNAs similar to siRNA-mediated mRNA degradation. Thus, mRNAs have functions including repression of the mRNA translation and cleavage of mRNAs. In general, mRNAs including lin-4 and let-7 control the mRNA translation by partially base-pairing to the 3′-UIR region of target mRNA²⁻⁵. In Arabidopsis thaliana, miR-171 and miR-165/166 are perfectly complementary to coding region of Scarecrow-like (SCL) family mRNA, PHAVOLUTA (PHV) and PHABULOSA (PHB) mRNA, respectively^{17,18}. These mRNAs cleave their target mRNAs, resulting in siRNA-like gene silencing. It has been proposed that there is only a single pathway shared by both mRNAs and siRNAs and that this single pathway mediates both translational control and mRNA cleavage⁴³.

[0005] In C. elegans, let-7 and lin-4 are expressed sequentially during development^{2-5,19}. Thus, since mRNAs suppress the expression of the lin-41 and lin-14/28 genes that are necessary for normal development of C. elegans, it is likely that these mRNAs play important roles in development²⁻⁵. In plants, several genes that are targets of mRNAs, including genes in the SCL family, have been identified and their functions have been characterized^{17,18}. SCL family, a target of miR-171, controls a wide range of developmental processes, including radial patterning in roots and hormone signaling. In addition, miR-165/166 can regulate the expression of PHV and PHB genes that encode homeodomain-leucine zipper transcription factors implicated in the perception of radial position in the shoot tissues that give rise to leaves. Moreover, bantam microRNA simultaneously stimulates cell proliferation and prevents apoptosis during Drosophila development⁴⁴. Thus, a number of mRNAs have been identified as playing important roles in the development of animals and plants.

[0006] Although more than two hundred mRNAs have been found in mammals, the target mRNAs of these known mRNAs remain to be identified. In view of the well established need in the art for additional means to regulate gene expression in mammalian systems, identifying the mRNA target sequences for those known mammalian miRNAs would have great implications for controlling ontogenesis, function, differentiation and/or viability of a mammalian cell.

### SUMMARY OF THE INVENTION

[0007] The present invention provides products and methods for modulating expression of a target gene in a cell. One such method comprises introducing into the cell a polynucleotide that forms a duplex region with an mRNA transcribed from said target gene, wherein the duplex region comprises a mammalian mRNA target region. Another such method comprises introducing into the cell an siRNA that forms a duplex region with an mRNA, or precursor thereof wherein an miRNA transcribed from the target gene comprises a mRNA target region. In certain preferred embodiments, the methods further comprise measuring expression of the target gene. The methods are particularly useful for modulating ontogenesis, function, differentiation and/or viability of a mammalian cell. As such, the invention also provides methods for controlling ontogenesis of mammal, function of mammalian cell, differentiation of mammalian cell or viability of mammalian cell in the post-transcriptional phase by introducing into the cell a mRNA or a siRNA silencing precursor to the mRNA. The invention additionally provides polynucleotides, including mRNAs, siRNAs, and vectors, useful in the method of the instant invention. The provided vectors include a plasmid vector comprising a promoter and a polynucleotide sequence expressing mRNA or a precursor to the mRNA. Also included is a plasmid vector comprising a promoter and a nucleotide sequence expressing siRNA silencing precursor to mRNA. In certain preferred embodiments, the mRNA is capable of forming a duplex region with an mRNA transcribed from a mammalian target gene.

### BRIEF DESCRIPTION OF THE DRAWINGS

[0008] FIGS. 1a-1e. Hes1 (NM-005524) is a target of miR-23. a, The prediction of secondary structures between miR-23 and its target RNAs. A region sharing high homology to human and mouse miR-23 is located in the coding region, near the termination codon (box), of human Hairy HES1 (NML005524), mouse Hes1, and human Homolog HES1 (Y07572) mRNAs (top). b, Human Hairy HES1 (NM_{—}005524) mRNA has three target regions (motifs I, II and III) of miR-23 (bottom). Motif m has a K box sequence (black box) that is known, at least in the case of Drosophila, to be involved in post-transcriptional negative regulation. c, The level of Hes1 in NT2 cells in the presence or absence of RA (5 μM, for 3 weeks). Values are means with S.D. of results from three replicates in each case. d, The relative level of Hes1 mRNA in NT2 cells in the presence or absence of RA (5 μM, for 3 weeks). The relative level of Hes1 mRNA was determined by Northern blotting analysis. N; nuclear fraction, C; cytoplasmic fraction. e, The level of miR-23 in NT2 cells in the presence or absence of RA (5 μM, for 3 weeks) was determined by Northern blotting analysis.

[0009] FIGS. 2a-2h. Effects of synthetic miR-23 and siRNA-miR-23 targeted to a loop region of the precursor to miR-23 on expression of the gene for Hes1. a, Sequences of synthetic miR-23, double stranded miR-23 and mutant miR-23. Asterisks indicate nucleotides mutated relative to those in the sequence of miR-23. b, The level of HES1 in undifferentiated NT2 cells that had been treated with synthetic miR-23 (100 nM) or with synthetic mutant miR-23 (100 nM) in the absence of RA. Values are means with S.D. of results from three replicates in each case. c, The level of HES1 in undifferentiated NT2 cells that had been treated with synthetic single stranded miR-23 (100 nM) or with synthetic double stranded miR-23 (100 nM) in the absence of RA. d, The level of Hes1 mRNA in undifferentiated NT2 cells that had been treated with synthetic miR-23 or synthetic mutant miR-23 in the absence of RA. N; nuclear fraction, C; cytoplasmic fraction. e, Sequences of synthetic siRNA-miR-23 and synthetic mutant siRNA-miR-23. & The level of precursor and mature miR-23, as detected by Northern blotting analysis in NT2 cells in the presence of RA (5 μM, for 3 weeks). Actin mRNA was used as an endogenous control. g, The level of HES1 in NT2 cells in the presence of RA (5 μM). Values are means with S.D. of results from three replicates in each case. h, The level of Hes1 mRNA in differentiated NT2 cells in the presence of RA (5 μM). N; nuclear fraction, C; cytoplasmic fraction.

[0010] FIGS. 3a-3h. Target specificity of miR-23, as determined with plasmids that encoding a gene for luciferase fused to the sequences of three target motifs of miR-23 in Hairy HES1 mRNA and Homolog HES1 mRNA. a, Sequences of genes for Luc-TM23, Luc-mutant TM23 and Luc-mutant motif. The target site of miR-23 or mutant miR-23 is in a black box. Asterisks indicate nucleotides mutated relative to those in the target site of miR-23. b, The activity of luciferase, due to the reporter genes, in NT2 cells in the presence or absence of RA (5 μM). Values are means with S.D. of results from three replicates in each case. c, The activity of luciferase, due to the reporter genes, in undifferentiated NT2 cells in the presence or absence of synthetic miR-23 or mutant miR-23. d, The activitiy of luciferase, due to the reporter genes, in differentiated NT2 cells in the presence or absence of siRNA-miR-23. e, Sequences of genes for Luc-TS23 and mutant Luc-TS23 (Luc-mTS23). The target site of miR-23 or mutant miR-23 is in a blue box. Asterisks indicate nucleotides mutated relative to those in the target site of miR-23. f, The activitiy of luciferase, due to the reporter genes, in NT2 cells in the presence or absence of RA (5 μM). Values are means with S.D. of results from three replicates in each case. g, The activitiy of luciferase, due to the reporter genes, in undifferentiated NT2 cells in the presence or absence of synthetic miR-23 or mutant miR-23. h, The activitiy of luciferase, due to the reporter genes, in differentiated NT2 cells in the presence or absence of siRNA-miR-23.

[0011] FIGS. 4a-4c. The role of miR-23 during the RA-induced neuronal differentiation of NT2 cells a, Effects of siRNA-miR-23 on RA-induced neuronal differentiation. Left panel, wild-type NT2 cells after treatment with RA (5 μM, for 3 weeks); middle panel, NT2 cells after treatment with siRNA-miR-23 and RA; right panel, NT2 cells after treatment with siRNA-miR-23, synthetic miR-23 and RA. Nuclei of each NT2 cell were stained with 4-diamidino-2-phenylindole (DAPI). b, The level of MAP2 after RA-induced (5 μM RA) neuronal differentiation. c, The level of SSEA-3 after RA-induced (5 μM RA) neuronal differentiation.

[0012] FIG. 5. The effect of various mRNAs on expressions these target mRNAs. The levels of target proteins were analyzed by western blotting and calculated using NIH image program.

[0013] Table 1. Identification of target genes for various mRNAs.

### DETAILED DESCRIPTION

[0014] Unless otherwise defined, all technical and scientific terms used herein have the same meaning as commonly understood by one of ordinary skill in the art to which this invention belongs. Although methods and materials similar or equivalent to those described herein can be used in the practice or testing of the present invention, suitable methods and materials are described below. All publications, patent applications, patents, and other references mentioned herein are incorporated by reference in their entirety. In case of conflict, the present specification, including definitions, will control. In addition, the materials, methods, and examples are illustrative only and not intended to be limiting.

[0015] As used herein, the term “siRNA” refers to a double stranded RNA molecule which binds to a target polyribonucleotide. In a preferred embodiment, binding of the siRNA to the target molecule inhibits the function of the target polyribonucleotide.

[0016] As used herein, the term “organism” refers to any living entity comprised of at least one cell. A living organism can be as simple as, for example, a single eukaryotic cell or complex multi-cellular animal, such as a mammal.

[0017] As used herein, the term “mammal” refers to members of the class Mammalia, including the primates. Particularly preferred members of the class Mammalia include human, cattle, goat, pig, sheep, rodent, hamster, mouse and rat.

[0018] The term “heterologous” refers to a combination of elements not naturally occurring. For example, heterologous DNA refers to DNA not naturally located in the cell, or in a chromosomal site of the cell. Preferably, the heterologous DNA includes a gene foreign to the cell. A heterologous expression regulatory element is such an element operatively associated with a different gene than the one it is operatively associated with in nature.

[0019] As used herein, two polynucleotide sequences are said to be “substantially homologous” or to share “substantial homology” when they share about 70% identity. In a more preferred embodiment, polynucleotides sharing “substantial homology” are those having at least about 80% identity, more preferably at least about 90% identity, and still more preferably, at least about 95% identity. It is additionally preferred that such substantially homologous polynucleotides share a functional similarity. For example, in one particullary preferred embodiment, substantially homologous polynucleotides will hybridize under moderately or highly stringent hybridization conditions. In another preferred embodiment, substantially homologous polynucleotides function to encode polypeptides that share a biologically significant activity characteristic of the polypeptide.

[0020] Stringency of hybridization refers to conditions under which polynucleotide duplex is stable. As known to those of skill in the art, the stability of duplex is a function of salt concentration and temperature (See, for example, Sambrook et al., Molecular Cloning: A Laboratory Manual 2d Ed. (Cold Spring Harbor Laboratory, (1989); incorporated herein by reference). Stringency levels used to hybridize a given probe with target-DNA can be readily varied by those of skill in the art. The phrase “low stringency hybridization” refers to conditions equivalent to hybridization in 10% formamide, 5×. Denhart's solution, 6×SSPE, 0.2% SDS at 42 degree C., followed by washing in 1×SSPE, 0.2% SDS, at 50 degrees C. Denhart's solution and SSPE are well known to those of skill in the art as are other suitable hybridization buffers. (See, e.g., Sambrook et al., Molecular Cloning, A Laboratory Manual, Cold Spring Harbor Laboratory Press, 1989)

[0021] As used herein, the term “moderately stringent hybridization” refers to conditions that permit target-DNA to bind a complementary nucleic acid that has about 70% identity, preferably about 75% identity, more preferably about 86% identity to the target DNA; with greater than about 90% identity to target-DNA being especially preferred. Preferably, moderately stringent conditions are conditions equivalent to hybridization in 50% formamide, 5× Denhart's solution, 5×SSPE, 0.2% SDS at 42 degrees C., followed by washing in 0.2×SSPE, 0.2% SDS, at 65 degrees C. Additional examples of typical “moderately stringent conditions” include 0.015 M sodium chloride, 0.0015 M sodium citrate at 50-65 degrees C. or 0.015 M sodium chloride, 0.0015 M sodium citrate, and 20% formamide at 37-50 degrees C. For the purposes of illustration, a “moderately stringent” condition of 50 degrees C. in 0.015 M sodium ion is expected to allow about a 20% mismatch.

[0022] The term “highly stringent hybridization” refers to conditions that permit hybridization of only those nucleic acid sequences that that share a high degree identity. High stringency conditions can be provided, for example, by hybridization in 50% formamide, 5× Denhart's solution, 5×SSPE, 0.2% SDS at 42.degrees C., followed by washing in 0.1×SSPE, and 0.1% SDS at 65 degrees C. Additional examples of “highly stringent conditions” for hybridization and washing include 0.015M sodium chloride, 0.0015M sodium citrate at 65-68 degrees C. or 0.015M sodium chloride, 0.0015M sodium citrate, and 50% formamide at 42.degrees.

[0023] The “percent identity” between the two sequences is a function of the number of identical positions shared by the sequences. The determination of percent identity between two sequences can be accomplished using any conventional mathematical algorithm, such as the BLAST algorithm by Karlin and Altschul (S. Karlin and S. F. Altschul, Proc. Natl. Acad. Sci. USA. 1990, 87: 2264-2268; S. Karlin and S. F. Altschul, Proc. Natl. Acad. Sci. USA. 1993, 90:5873-5877). The BLAST algorithm is incorporated into the BLASTN program of Altschul et al. (S. F. Altschul et al., J. Mol. Biol. 1990, 215: 403). When a nucleotide sequence is analyzed according to BLASTN, suitable parameters include, for example, a score=100 and word length=12. To obtain gapped alignments for comparison purposes, Gapped BLAST can be utilized as described in Altschul et al. (1997) Nucleic Acids Res. 25:3389. When utilizing BLAST and Gapped BLAST, the default parameters of the respective programs are preferably used. However, one skilled in the art can readily adjust the parameters to suit a particular purpose. Specific procedures for such analysis are known in the art (See, for example, the BLAST website of the National Center for Biotechnology Information.)

[0024] The term “corresponding to” is used herein to refer to similar or homologous sequences, whether the exact position is identical or different from the molecule to which the similarity or homology is measured. A nucleic acid or amino acid sequence alignment may include spaces. Thus, the term “corresponding to” refers to the sequence similarity, and not the numbering of the amino acid residues or nucleotide bases.

[0025] A “vector” is a recombinant nucleic acid construct, such as plasmid, phage genome, virus genome, cosmid, or artificial chromosome to which another DNA segment may be attached. In a specific embodiment, the vector may bring about the replication of the attached segment, e.g., in the case of a cloning vector. A “replicon” is any genetic element (e.g., plasmid, chromosome, virus) that functions as an autonomous unit of DNA replication in vivo, i.e., it is capable of replication under its own control. Other preferred examples of vectors include expression vectors comprising expression control sequences.

[0026] “Expression control sequences”, e.g., transcriptional and translational control sequences, are regulatory sequences that flank a coding sequence, such as promoters, enhancers, suppressors, terminators, and the like, that provide for the expression of a coding sequence in a host cell. In eukaryotic cells, polyadenylation signals are control sequences. On mRNA, a ribosome binding site is one example of an expression control sequence.

[0027] The term “gene” as used herein refers to a portion of a DNA molecule that includes a polypeptide coding sequence operatively associated with one or more expression control sequences. In one embodiment, a gene can be a genomic or partial genomic sequence, in that it contains one or more introns. In another embodiment, a gene can be a cDNA molecule (i.e., the coding sequence lacking any introns).

[0028] The gene herein after referred to as “dbl proto-oncogene” (or alternatively as dbl) is well-known in the art. (For a non-limiting example, see GenBank Accession X12556, herein incorporated by reference.) As used herein, the term “dbl proto-oncogene” (as well as dbl) refers to a gene capable of transcribing an mRNA transcript having substantial homology with an mRNA transcribed from the gene for the dbl proto-oncogene set forth in SEQ ID No:291. In a preferred embodiment an mRNA transcribed from said gene comprises an mRNA target region having substantial homology to an mRNA target region set forth in SEQ ID No: 121.

[0029] The gene herein after referred to as “transforming growth factor beta 1” (or alternatively as TGFBI) is well-known in the art. (For a non-limiting example, see GenBank Accession NM_{—}000660, herein incorporated by reference.) As used herein, the term “transforming growth factor beta” (as well as TGFBI) refers to a gene capable of transcribing an mRNA transcript having substantial homology with an mRNA transcribed from the gene for the gene for the transforming growth factor beta set forth in SEQ ID No:292. In a preferred embodiment an mRNA transcribed from said gene comprises an mRNA target region having substantial homology to an mRNA target region set forth in SEQ ID No: 122.

[0030] The gene herein after referred to as “transforming growth factor alpha” (or alternatively as TGFA or TGF alpha) is well-known in the art. (For a non-limiting example, see GenBank Accession NM_{—}003236, herein incorporated by reference.) As used herein, the term “transforming growth factor alpha” (as well as TGFA or TGF alpha) refers to a gene capable of transcribing an mRNA transcript having substantial homology with an mRNA transcribed from the gene for the transforming growth factor alpha set forth in SEQ ID No:293. In a preferred embodiment an mRNA transcribed from said gene comprises an mRNA target region having substantial homology to an mRNA target region set forth in SEQ ID No: 123.

[0031] The gene herein after referred to as “v-myb myeloblastosis viral oncogene homolog” (or alternatively as V-myb or MYB) is well-known in the art. (For a non-limiting example, see GenBank Accession NM_{—}005375, herein incorporated by reference.) As used herein, the term “v-myb myeloblastosis viral oncogene homolog” (as well as V-myb or MYB) refers to a gene capable of transcribing an mRNA transcript having substantial homology with an mRNA transcribed from the gene for the v-myb myeloblastosis viral oncogene homolog set forth in SEQ ID No:294. In a preferred embodiment an mRNA transcribed from said gene comprises an mRNA target region having substantial homology to an mRNA target region set forth in one or more of SEQ ID Nos: 124 and 185.

[0032] The gene herein after referred to as “c-cbl proto-oncogene” (or alternatively as c-cbl) is well-known in the art. (For a non-limiting example, see GenBank Accession X57110, herein incorporated by reference.) As used herein, the term “c-cbl proto-oncogene” (as well as c-cbl) refers to a gene capable of transcribing an mRNA transcript having substantial homology with an mRNA transcribed from the gene for the c-cbl proto-oncogene set forth in SEQ ID No:295. In a preferred embodiment an mRNA transcribed from said gene comprises an mRNA target region having substantial homology to an mRNA target region set forth in SEQ ID No: 125.

[0033] The gene herein after referred to as “snoI” (or alternatively as SNO I) is well-known in the art. (For a non-limiting example, see GenBank Accession Z19588, herein incorporated by reference.) As used herein, the term “snorI” (as well as SNO I) refers to a gene capable of transcribing an mRNA transcript having substantial homology with an mRNA transcribed from the gene for the snoI set forth in SEQ ID No:296. In a preferred embodiment an mRNA transcribed from said gene comprises an mRNA target region having substantial homology to an mRNA target region set forth in SEQ ID No: 126.

[0034] The gene herein after referred to as “activin beta E subunit” (or alternatively as Activin beta) is well-known in the art. (For a non-limiting example, see GenBank Accession AF412024, herein incorporated by reference.) As used herein, the term “activin beta E subunit” (as well as Activin beta) refers to a gene capable of transcribing an mRNA transcript having substantial homology with an mRNA transcribed from the gene for the activin beta E subunit set forth in SEQ ID No:297. In a preferred embodiment an mRNA transcribed from said gene comprises an mRNA target region having substantial homology to an mRNA target region set forth in SEQ ID No: 127.

[0035] The gene herein after referred to as “myogenic factor 5” (or alternatively as Myf-5 or MYF5) is well-known in the art. (For a non-limiting example, see GenBank Accession NM_{—}005593, herein incorporated by reference.) As used herein, the term “myogenic factor 5” (as well as Myf-5 or MYF5) refers to a gene capable of transcribing an mRNA transcript having substantial homology with an mRNA transcribed from the gene for the myogenic factor 5 set forth in SEQ ID No:298. In a preferred embodiment an mRNA transcribed from said gene comprises an mRNA target region having substantial homology to an mRNA target region set forth in one or more of SEQ ID Nos:″128 and 267.

[0036] The gene herein after referred to as “fibroblast growth factor 9” (or alternatively as FGF9 or glia-activating factor) is well-known in the art. (For a non-limiting example, see GenBank Accession NM_{—}002010, herein incorporated by reference.) As used herein, the term “fibroblast growth factor 9” (as well as FGF9 and glia-activating factor) refers to a gene capable of transcribing an mRNA transcript having substantial homology with an mRNA transcribed from the gene for the fibroblast growth factor 9 set forth in SEQ ID No:299. In a preferred embodiment an m-RNA transcribed from said gene comprises an mRNA target region having substantial homology to an mRNA target region set forth in SEQ ID No: 129.

[0037] The gene herein after referred to as “RON encoding a tyrosine kinase” (or alternatively as RON) is well-known in the art. (For a non-limiting example, see GenBank Accession X70040, herein incorporated by reference.) As used herein, the term “RON encoding a tyrosine kinase” (as well as RON) refers to a gene capable of transcribing an mRNA transcript having substantial homology with an mRNA transcribed from the gene for the RON encoding a tyrosine kinase set forth in SEQ ID No:300. In a preferred embodiment an mRNA transcribed from said gene comprises an mRNA target region having substantial homology to an mRNA target region set forth in SEQ ID No: 130.

[0038] The gene herein after referred to as “E3 ubiquitin ligase SMURF1” (or alternatively as SMURF1) is well-known in the art. (For a non-limiting example, see GenBank Accession NM_{—}020429, herein incorporated by reference.) As used herein, the term “E3 ubiquitin ligase SMURF1” (as well as SMURF1) refers to a gene capable of transcribing an mRNA transcript having substantial homology with an mRNA transcribed from the gene for the E3 ubiquitin ligase SMURF1 set forth in SEQ ID No:301. In a preferred embodiment an mRNA transcribed from said gene comprises an mRNA target region having substantial homology to an mRNA target region set forth in SEQ ID No: 131.

[0039] The gene herein after referred to as “jagged 2” (or alternatively as JAG2) is well-known in the art. (For a non-limiting example, see GenBank Accession NM_{—}002226, herein incorporated by reference.) As used herein, the term “jagged 2” (as well as JAG2) refers to a gene capable of transcribing an mRNA transcript having substantial homology with an mRNA transcribed from the gene for the jagged 2 set forth in SEQ ID No:302. In a preferred embodiment an mRNA transcribed from said gene comprises an mRNA target region having substantial homology to an mRNA target region set forth in SEQ ID No: 132.

[0040] The gene herein after referred to as “jun-B encoding the JUN-B protein” (or alternatively as JunB) is well-known in the art. (For a non-limiting example, see GenBank Accession X51345, herein incorporated by reference.) As used herein, the term “jun-B encoding the JUN-B protein”. (as well as JunB) refers to a gene capable of transcribing an mRNA transcript having substantial homology with an mRNA transcribed from the gene for the jun-B encoding the JUN-B protein set forth in SEQ ID No:303. In a preferred embodiment an mRNA transcribed from said gene comprises an mRNA target region having substantial homology to an mRNA target region set forth in SEQ ID No: 133.

[0041] The gene herein after referred to as “methyl-CpG binding domain protein 4” (or alternatively as MBD4) is well-known in the art. (For a non-limiting example, see GenBank Accession NM_{—}003925, herein incorporated by reference.) As used herein, the term “methyl-CpG binding domain protein 4” (as well as MBD4) refers to a gene capable of transcribing an mRNA transcript having substantial homology with an mRNA transcribed from the gene for the methyl-CpG binding domain protein 4 set forth in SEQ ID No:304. In a preferred embodiment an mRNA transcribed from said gene comprises an mRNA target region having substantial homology to an mRNA target region set forth in SEQ ID No: 134.

[0042] The gene herein after referred to as “ZIP kinase” (or alternatively as ZIP Kinase) is well-known in the art. (For a non-limiting example, see GenBank Accession AB022341, herein incorporated by reference.) As used herein, the term “ZIP kinase” (as well as ZIP Kinase) refers to a gene capable of transcribing an mRNA transcript having substantial homology with an m-RNA transcribed from the gene for the ZIP kinase set forth in SEQ ID No:305. In a preferred embodiment an mRNA transcribed from said gene comprises an mRNA target region having substantial homology to an miRNA target region set forth in SEQ ID No: 135.

[0043] The gene herein after referred to as “endomucin” (or alternatively as Endomucin or EMCN) is well-known in the art. (For a non-limiting example, see GenBank Accession NM_{—}016242, herein incorporated by reference.) As used herein, the term “endomucin” (as well as Endomucin or EMCN) refers to a gene capable of transcribing an mRNA transcript having substantial homology with an mRNA transcribed from the gene for the endomucin set forth in SEQ ID No:306. In a preferred embodiment an mRNA transcribed from said gene comprises an mRNA target region having substantial homology to an mRNA target region set forth in SEQ ID No: 136.

[0044] The gene herein after referred to as “ICE-protease activating factor” (or alternatively as IPAF) is well-known in the art. (For a non-limiting example, see GenBank Accession AY035391, herein incorporated by reference.) As used herein, the term “ICE-protease activating factor” (as well as IPAF) refers to a gene capable of transcribing an mRNA transcript having substantial homology with an mRNA transcribed from the gene for the ICE-protease activating factor set forth in SEQ ID No:307. In a preferred embodiment an mRNA transcribed from said gene comprises an mRNA target region having substantial homology to an mRNA target region set forth in SEQ ID No: 137.

[0045] The gene herein after referred to as “hairy and enhancer of split 1” (or alternatively as HES1) is well-known in the art. (For a non-limiting example, see GenBank Accession NM_{—}005524, herein incorporated by reference.) As used herein, the term “hairy and enhancer of split 1” (as well as Hes1) refers to a gene capable of transcribing an mRNA transcript having substantial homology with an mRNA transcribed from the gene for the hairy and enhancer of split 1 set forth in SEQ ID No:308. In a preferred embodiment an mRNA transcribed from said gene comprises an mRNA target region having substantial homology to an mRNA target region set forth in one or more of SEQ ID Nos: 5, 6, 7 and 171.

[0046] The gene herein after referred to as “transforming growth factor beta 3” (or alternatively as TGF-B3 or TGFB3) is well-known in the art. (For a non-limiting example, see GenBank Accession NM_{—}003239, herein incorporated by reference.) As used herein, the term “transforming growth factor beta 3” (as well as TGF-B3 or TGFB3) refers to a gene capable of transcribing an mRNA transcript having substantial homology with an mRNA transcribed from the gene for the transforming growth factor beta 3 set forth in SEQ ID No:309. In a preferred embodiment an mRNA transcribed from said gene comprises an mRNA target region having substantial homology to an mRNA target region set forth in SEQ ID No: 138.

[0047] The gene herein after referred to as “enaptin mRNA” (or alternatively as enaptin) is well-known in the art. (For a non-limiting example, see GenBank Accession AF535142, herein incorporated by reference.) As used herein, the term “enaptin mRNA” (as well as enaptin) refers to a gene capable of transcribing an mRNA transcript having substantial homology with an mRNA transcribed from the gene for the enaptin mRNA set forth in SEQ ID No:310. In a preferred embodiment an mRNA transcribed from said gene comprises an mRNA target region having substantial homology to an mRNA target region set forth in SEQ ID No: 139.

[0048] The gene herein after referred to as “AMP deaminase” (or alternatively as AMPD3) is well-known in the art. (For a non-limiting example, see GenBank Accession M84721, herein incorporated by reference.) As used herein, the term “AMP deaminase” (as well as AMPD3) refers to a gene capable of transcribing an mRNA transcript having substantial homology with an mRNA transcribed from the gene for the AMP deaminase set forth in SEQ ID No:311. In a preferred embodiment an mRNA transcribed from said gene comprises an mRNA target region having substantial homology to an mRNA target region set forth in SEQ ID No: 140.

[0049] The gene herein after referred to as “interleukin 1 alpha” (or alternatively as IL1A) is well-known in the art. (For a non-limiting example, see GenBank Accession AF536338, herein incorporated by reference.) As used herein, the term “interleukin 1 alpha” (as well as IL1A) refers to a gene capable of transcribing an mRNA transcript having substantial homology with an mRNA transcribed from the gene for the interleukin 1 alpha set forth in SEQ ID No:312. In a preferred embodiment an mRNA transcribed from said gene comprises an mRNA target region having substantial homology to an mRNA target region set forth in SEQ ID No: 141.

[0050] The gene herein after referred to as “E2F transcription factor 6” (or alternatively as E2F6) is well-known in the art. (For a non-limiting example, see GenBank Accession NM_{—}001952, herein incorporated by reference.) As used herein, the term “E2F transcription factor 6” (as well as E2F6) refers to a gene capable of transcribing an mRNA transcript having substantial homology with an mRNA transcribed from the gene for the E2F transcription factor 6 set forth in SEQ ID No:313. In a preferred embodiment an mRNA transcribed from said gene comprises an mRNA target region having substantial homology to an mRNA target region set forth in SEQ ID No: 142.

[0051] The gene herein after referred to as “laminin alpha” (or alternatively as laminin alpha or LAMA) is well-known in the art. (For a non-limiting example, see GenBank Accession NM_{—}005559, herein incorporated by reference.) As used herein, the term “laminin alpha” (as well as laminin alpha or LAMA) refers to a gene capable of transcribing an mRNA transcript having substantial homology with an mRNA transcribed from the gene for the laminin alpha set forth in SEQ ID No: 314. In a preferred embodiment an mRNA transcribed from said gene comprises an mRNA target region having substantial homology to an mRNA target region set forth in SEQ ID No: 143.

[0052] The gene herein after referred to as “polymerase (DNA-directed) alpha” (or alternatively as DNA Pol alpha or POLA2) is well-known in the art. (For a non-limiting example, see GenBank Accession NM_{—}002689, herein incorporated by reference.) As used herein, the term “polymerase (DNA-directed) alpha” (as well as DNA Pol alpha or POLA2) refers to a gene capable of transcribing an mRNA transcript having substantial homology with an mRNA transcribed from the gene for the polymerase (DNA-directed) alpha set forth in SEQ ID No:315. In a preferred embodiment an mRNA transcribed from said gene comprises an mRNA target region having substantial homology to an mRNA target region set forth in SEQ ID No: 144.

[0053] The gene herein after referred to as “leukocyte tyrosine kinase” (or alternatively as LTK) is well-known in the art. (For a non-limiting example, see GenBank Accession NM_{—}002344, herein incorporated by reference.) As used herein, the term “leukocyte tyrosine kinase” (as well as LTK) refers to a gene capable of transcribing an mRNA transcript having substantial homology with an mRNA transcribed from the gene for the leukocyte tyrosine kinase set forth in SEQ ID No:316. In a preferred embodiment an mRNA transcribed from said gene comprises an mRNA target region having substantial homology to an mRNA target region set forth in SEQ ID No: 145.

[0054] The gene herein after referred to as “homeo box D1” (or alternatively as HOXD1) is well-known in the art. (For a non-limiting example, see GenBank Accession NM_{—}024501, herein incorporated by reference.) As used herein, the term “homeo box D1” (as well as HOXD1) refers to a gene capable of transcribing an mRNA transcript having substantial homology with an mRNA transcribed from the gene for the homeo box D1 set forth in SEQ ID No:317. In a preferred embodiment an mRNA transcribed from said gene comprises an mRNA target region having substantial homology to an mRNA target region set forth in SEQ ID No: 146.

[0055] The gene herein after referred to as “laminin gamma” (or alternatively as LAMB2 or laminin gamma) is well-known in the art. (For a non-limiting example, see GenBank Accession NM_{—}002293, herein incorporated by reference.) As used herein, the term “laminin gamma” (as well as LAMB2 or laminin gamma) refers to a gene capable of transcribing an mRNA transcript having substantial homology with an mRNA transcribed from the gene for the laminin gamma (formerly LAMB2) set forth in SEQ ID No:318. In a preferred embodiment an mRNA transcribed from said gene comprises an mRNA target region having substantial homology to an mRNA target region set forth in SEQ ID No: 147.

[0056] The gene herein after referred to as “tumor necrosis factor receptor superfamily member 1A” (or alternatively as TNFR1) is well-known in the art. (For a non-limiting example, see GenBank Accession BC010140, herein incorporated by reference.) As used herein, the term “tumor necrosis factor receptor superfamily member 1A” (as well as TNFR1) refers to a gene capable of transcribing an mRNA transcript having substantial homology with an mRNA transcribed from the gene for the tumor necrosis factor receptor superfamily member 1A set forth in SEQ ID No:319. In a preferred embodiment an mRNA transcribed from said gene comprises an mRNA target region having substantial homology to an mRNA target region set forth in one or more of SEQ ID Nos:″148 and 200.

[0057] The gene herein after referred to as “villin 2” (or alternatively as Villin2 or VIL2) is well-known in the art. (For a non-limiting example, see GenBank Accession NM_{—}003379, herein incorporated by reference.) As used herein, the term “villin 2” (as well as Villin2 or VIL2) refers to a gene capable of transcribing an mRNA transcript having substantial homology with an mRNA transcribed from the gene for the villin 2 set forth in SEQ ID No:320. In a preferred embodiment an mRNA transcribed from said gene comprises an mRNA target region having substantial homology to an mRNA target region set forth in SEQ ID No:149.

[0058] The gene herein after referred to as “frizzled homolog 5” (or alternatively as Frizzled homolog 5 or FZD5) is well-known in the art. (For a non-limiting example, see GenBank Accession NM_{—}003468, herein incorporated by reference.) As used herein, the term “frizzled homolog 6” (as well as Frizzled homolog 5 or FZD5) refers to a gene capable of transcribing an mRNA transcript having substantial homology with an mRNA transcribed from the gene for the frizzled homolog 5 set forth in SEQ ID No:321. In a preferred embodiment an mRNA transcribed from said gene comprises an mRNA target region having substantial homology to an mRNA target region set forth in SEQ ID No: 150.

[0059] The gene herein after referred to as “ATP-dependent chromatin remodelling protein” (or alternatively as ACF1) is well-known in the art. (For a non-limiting example, see GenBank Accession AF213467, herein incorporated by reference.) As used herein, the term “ATP-dependent chromatin remodelling protein” (as well as ACF1) refers to a gene capable of transcribing an mRNA transcript having substantial homology with an mRNA transcribed from the gene for the ATP-dependent chromatin remodelling protein set forth in SEQ ID No:322. In a preferred embodiment an mRNA transcribed from said gene comprises an mRNA target region having substantial homology to an mRNA target region set forth in SEQ ID No: 151.

[0060] The gene herein after referred to as “MSX2 mRNA for transcription factor” (or alternatively as MSX2) is well-known in the art. (For a non-limiting example, see GenBank Accession X69295, herein incorporated by reference.) As used herein, the term “MSX2 mRNA for transcription factor” (as well as MSX2) refers to a gene capable of transcribing an mRNA transcript having substantial homology with an mRNA transcribed from the gene for the MSX2 mRNA for transcription factor set forth in SEQ ID No:323. In a preferred embodiment an mRNA transcribed from said gene comprises an mRNA target region having substantial homology to an mRNA target region set forth in SEQ ID No:152.

[0061] The gene herein after referred to as “adipose differentiation-related protein” (or alternatively as ADFP) is well-known in the art. (For a non-limiting example, see GenBank Accession NM_{—}001122, herein incorporated by reference.) As used herein, the term “adipose differentiation-related protein” (as well as ADFP) refers to a gene capable of transcribing an mRNA transcript having substantial homology with an mRNA transcribed from the gene for the adipose differentiation-related protein set forth in SEQ ID No:324. In a preferred embodiment an mRNA transcribed from said gene comprises an mRNA target region having substantial homology to an mRNA target region set forth in SEQ ID No: 153.

[0062] The gene herein after referred to as “myogenic factor 4” (or alternatively as myogenin or Myf-4 or MYOG) is well-known in the art. For a non-limiting example, see GenBank Accession NM_{—}002479, herein incorporated by reference.) As used herein, the term “myogenic factor 4” (as well as myogenin or Myf-4 or MYOG) refers to a gene capable of transcribing an mRNA transcript having substantial homology with an mRNA transcribed from the gene for the myogenin (myogenic factor 4) set forth in SEQ ID No:325. In a preferred embodiment an mRNA transcribed from said gene comprises an mRNA target region having substantial homology to an mRNA target region set forth in SEQ ID No:154.

[0063] The gene herein after referred to as “SRY (Sex determining Region Y)-box 5” (or alternatively as Sox-6 or SOX5) is well-known in the art. (For a non-limiting example, see GenBank Accession NM_{—}006940, herein incorporated by reference.) As used herein, the term “SRY (Sex determining Region Y)-box 5” (as well as Sox-5 or SOX5) refers to a gene capable of transcribing an mRNA transcript having substantial homology with an mRNA transcribed from the gene for the SRY (Sex determining Region Y)-box 5 set forth in SEQ ID No:326. In a preferred embodiment an mRNA transcribed from said gene comprises an mRNA target region having substantial homology to an mRNA target region set forth in SEQ ID No: 155.

[0064] The gene herein after referred to as “Notch homolog 1” (or alternatively as Notch1) is well-known in the art. For a non-limiting example, see GenBank Accession NM_{—}017617, herein incorporated by reference.) As used herein, the term “Notch homolog 1” (as well as Notch1) refers to a gene capable of transcribing an mRNA transcript having substantial homology with an mRNA transcribed from the gene for the Notch homolog 1 set forth in SEQ ID No:327. In a preferred embodiment an mRNA transcribed from said gene comprises an mRNA target region having substantial homology to an mRNA target region set forth in SEQ ID No: 156.

[0065] The gene herein after referred to as “Human tyrosine kinase-type receptor” (or alternatively as ErbB2 or HER2) is well-known in the art. (For a non-limiting example, see GenBank Accession M11730, herein incorporated by reference.) As used herein, the term “Human tyrosine kinase-type receptor” (as well as ErbB2 or HER2) refers to a gene capable of transcribing an mRNA transcript having substantial homology with an mRNA transcribed from the gene for the Human tyrosine kinase-type receptor set forth in SEQ ID No:328. In a preferred embodiment an mRNA transcribed from said gene comprises an mRNA target region having substantial homology to an mRNA target region set forth in SEQ ID No: 157.

[0066] The gene herein after referred to as “polymerase (DNA directed) theta” (or alternatively as DNA Pol theta or POLQ) is well-known in the art. (For a non-limiting example, see GenBank Accession NM_{—}006596, herein incorporated by reference.) As used herein, the term “polymerase (DNA directed) theta” (as well as DNA Pol theta or POLQ) refers to a gene capable of transcribing an mRNA transcript having substantial homology with an mRNA transcribed from the gene for the polymerase (DNA directed) theta set forth in SEQ ID No:329. In a preferred embodiment an mRNA transcribed from said gene comprises an mRNA target region having substantial homology to an mRNA target region set forth in SEQ ID No:158.

[0067] The gene herein after referred to as “cAMP responsive element binding protein 3” (or alternatively as CREB3) is well-known in the art. (For a non-limiting example, see GenBank Accession NM_{—}006368, herein incorporated by reference.) As used herein, the term “cAMP responsive element binding protein 3” (as well as CREB3) refers to a gene capable of transcribing an mRNA transcript having substantial homology with an mRNA transcribed from the gene for the cAMP responsive element binding protein 3 set forth in SEQ ID No:330. In a preferred embodiment an mRNA transcribed from said gene comprises an mRNA target region having substantial homology to an mRNA target region set forth in one or more of SEQ ID Nos:″159 and 163.

[0068] The gene herein after referred to as “timeless homolog” (or alternatively as Timeless) is well-known in the art. (For a non-limiting example, see GenBank Accession BC050557, herein incorporated by reference.) As used herein, the term “timeless homolog” (as well as Timeless) refers to a gene capable of transcribing an mRNA transcript having substantial homology with an mRNA transcribed from the gene for the timeless homolog set forth in SEQ ID No:331. In a preferred embodiment an mRNA transcribed from said gene comprises an mRNA target region having substantial homology to an mRNA target region set forth in SEQ ID No:160.

[0069] The gene herein after referred to as “RAD52 homolog” (or alternatively as RAD52) is well-known in the art. (For a non-limiting example, see GenBank Accession NM_{—}002879, herein incorporated by reference.) As used herein, the term “RAD52 homolog” (as well as RAD52) refers to a gene capable of transcribing an mRNA transcript having substantial homology with an mRNA transcribed from the gene for the RAD52 homolog set forth in SEQ ID No:332. In a preferred embodiment an mRNA transcribed from said gene comprises an mRNA target region having substantial homology to an mRNA target region set forth in SEQ ID No: 161.

[0070] The gene herein after referred to as “toll-like receptor 4′ (or alternatively as TLR4) is well-known in the art. (For a non-limiting example, see GenBank Accession NM_{—}138554, herein incorporated by reference.) As used herein, the term “toll-like receptor 4” (as well as TLR4) refers to a gene capable of transcribing an mRNA transcript having substantial homology with an mRNA transcribed from the gene for the toll-like receptor 4 set forth in SEQ ID No:333. In a preferred embodiment an mRNA transcribed from said gene comprises an mRNA target region having substantial homology to an mRNA target region set forth in SEQ ID No: 162.

[0071] The gene herein after referred to as “SRY (Sex determining Region Y)-box 9” (or alternatively as SOX9) is well-known in the art. (For a non-limiting example, see GenBank Accession NM_{—}000346, herein incorporated by reference.) As used herein, the term “SRY (Sex determining Region Y)-box 9” (as well as SOX9) refers to a gene capable of transcribing an mRNA transcript having substantial homology with an mRNA transcribed from the gene for the SRY (Sex determining Region Y)-box 9 set forth in SEQ ID No:334. In a preferred embodiment an mRNA transcribed from said gene comprises an mRNA target region having substantial homology to an mRNA target region set forth in SEQ ID No: 164.

[0072] The gene herein after referred to as “homeo box A5” (or alternatively as HOXA5) is well-known in the art. (For a non-limiting example, see GenBank Accession NM_{—}019102, herein incorporated by reference.) As used herein, the term “homeo box A5” (as well as HOXA5) refers to a gene capable of transcribing an mRNA transcript having substantial homology with an mRNA transcribed from the gene for the homeo box A5 set forth in SEQ ID No:335. In a preferred embodiment an mRNA transcribed from said gene comprises an mRNA target region having substantial homology to an mRNA target region set forth in SEQ ID No: 165.

[0073] The gene herein after referred to as “cell division cycle 42 GTP binding protein” (or alternatively as CDC42) is well-known in the art. (For a non-limiting example, see GenBank Accession BC018266, herein incorporated by reference.) As used herein, the term “cell division cycle 42 GTP binding protein” (as well as CDC42) refers to a gene capable of transcribing an mRNA transcript having substantial homology with an mRNA transcribed from the gene for the cell division cycle 42 GTP binding protein set forth in SEQ ID No:336. In a preferred embodiment an mRNA transcribed from said gene comprises an mRNA target region having substantial homology to an mRNA target region set forth in SEQ ID No: 166.

[0074] The gene herein after referred to as “desmuslin” (or alternatively as DMN) is well-known in the art. (For a non-limiting example, see GenBank Accession NM_{—}145728, herein incorporated by reference.) As used herein, the term “desmuslin” (as well as DMN) refers to a gene capable of transcribing an mRNA transcript having substantial homology with an mRNA transcribed from the gene for the desmuslin set forth in SEQ ID No:337. In a preferred embodiment an mRNA transcribed from said gene comprises an mRNA target region having substantial homology to an mRNA target region set forth in SEQ ID No: 167.

[0075] The gene herein after referred to as “TFIIIC Box B-binding subunit” (or alternatively as TFIIIC Box B-binding subunit) is well-known in the art. (For a non-limiting example, see GenBank Accession U02619, herein incorporated by reference.) As used herein, the term “TFIIIC Box B-binding subunit” (as well as TFIIIC Box B-binding subunit) refers to a gene capable of transcribing an mRNA transcript having substantial homology with an mRNA transcribed from the gene for the TFIIIC Box B-binding subunit set forth in SEQ ID No:338. In a preferred embodiment an mRNA transcribed from said gene comprises an mRNA target region having substantial homology to an mRNA target region set forth in one or more of SEQ ID Nos:″168 and 169.

[0076] The gene herein after referred to as “profilin 2” (or alternatively as PFN2) is well-known in the art. (For a non-limiting example, see GenBank Accession NM_{—}053024, herein incorporated by reference.) As used herein, the term “profilin 2” (as well as PFN2) refers to a gene capable of transcribing an mRNA transcript having substantial homology with an mRNA transcribed from the gene for the profilin 2 set forth in SEQ ID No:339. In a preferred embodiment an mRNA transcribed from said gene comprises an mRNA target region having substantial homology to an mRNA target region set forth in SEQ ID No: 169.

[0077] The gene herein after referred to as “c-fms proto-oncogene” (or alternatively as c-fms) is well-known in the art. (For a non-limiting example, see GenBank Accession X03663, herein incorporated by reference.) As used herein, the term “c-fms proto-oncogene” (as well as c-fms) refers to a gene capable of transcribing an m-RNA transcript having substantial homology with an mRNA transcribed from the gene for the c-fms proto-oncogene set forth in SEQ ID No:340. In a preferred embodiment an mRNA transcribed from said gene comprises an mRNA target region having substantial homology to an mRNA target region set forth in SEQ ID No: 170.

[0078] The gene herein after referred to as “delta-like 1” (or alternatively as Deltalor DLL1) is well-known in the art. (For a non-limiting example, see GenBank Accession NM_{—}005618, herein incorporated by reference.) As used herein, the term “delta-like 1” (as well as Deltalor DLL1) refers to a gene capable of transcribing an mRNA transcript having substantial homology with an mRNA transcribed from the gene for the delta-like 1 set forth in SEQ ID No:341. In a preferred embodiment an mRNA transcribed from said gene comprises an mRNA target region having substantial homology to an mRNA target region set forth in SEQ ID No:172.

[0079] The gene herein after referred to as “fatty-acid-Coenzyme A ligase long-chain 5” (or alternatively as FACL5) is well-known in the art. (For a non-limiting example, see GenBank Accession NM_{—}016234, herein incorporated by reference.) As used herein, the term fatty-acid-Coenzyme A ligase long-chain 5” (as well as FACL5) refers to a gene capable of transcribing an mRNA transcript having substantial homology with an mRNA transcribed from the gene for the fatty-acid-Coenzyme A ligase long-chain 5 set forth in SEQ ID No:342. In a preferred embodiment an mRNA transcribed from said gene comprises an mRNA target region having substantial homology to an mRNA target region set forth in SEQ ID No:173.

[0080] The gene herein after referred to as “discs large homolog-associated protein 2” (or alternatively as DLGAP2) is well-known in the art. (For a non-limiting example, see GenBank Accession NM_{—}004745, herein incorporated by reference.) As used herein, the term “discs large homolog-associated protein 2” (as well as DLGAP2) refers to a gene capable of transcribing an mRNA transcript having substantial homology with an mRNA transcribed from the gene for the discs large homolog-associated protein 2 set forth in SEQ ID No:343. In a preferred embodiment an mRNA transcribed from said gene comprises an mRNA target region having substantial homology to an mRNA target region set forth in SEQ ID No: 174.

[0081] The gene herein after referred to as “TFIIH gene for transcription factor II H” (or alternatively as TFIIH) is well-known in the art. (For a non-limiting example, see GenBank Accession AB088103, herein incorporated by reference.) As used herein, the term “TFIIH gene for transcription factor II H” (as well as TFIIH) refers to a gene capable of transcribing an mRNA transcript having substantial homology with an mRNA transcribed from the gene for the TFIIH gene for transcription factor II H set forth in SEQ ID No:344. In a preferred embodiment an mRNA transcribed from said gene comprises an mRNA target region having substantial homology to an mRNA target region set forth in SEQ ID No: 176.

[0082] The gene herein after referred to as “RNA polymerase III subunit RPC” (or alternatively as RPC2) is well-known in the art. (For a non-limiting example, see GenBank Accession NM_{—}018082, herein incorporated by reference.) As used herein, the term “RNA polymerase III subunit RPC” (as well as RPC2) refers to a gene capable of transcribing an mRNA transcript having substantial homology with an mRNA transcribed from the gene for the RNA polymerase III subunit RPC set forth in SEQ ID No:345. In a preferred embodiment an mRNA transcribed from said gene comprises an mRNA target region having substantial homology to an mRNA target region set forth in SEQ ID No: 177.

[0083] The gene herein after referred to as “RecQ protein-like 5” (or alternatively as RecQ5) is well-known in the art. (For a non-limiting example, see GenBank Accession NM_{—}004259, herein incorporated by reference.) As used herein, the term “RecQ protein-like 5” (as well as RecQ5) refers to a gene capable of transcribing an mRNA transcript having substantial homology with an mRNA transcribed from the gene for the RecQ protein-like 5 set forth in SEQ ID No:346. In a preferred embodiment an mRNA transcribed from said gene comprises an mRNA target region having substantial homology to an mRNA target region set forth in SEQ ID No: 178.

[0084] The gene herein after referred to as “METH2 protein” (or alternatively as METH2) is well-known in the art. (For a non-limiting example, see GenBank Accession AF060153, herein incorporated by reference.) As used herein, the term “METHE2 protein” (as well as METH2) refers to a gene capable of transcribing an mRNA transcript having substantial homology with an mRNA transcribed from the gene for the METH2 protein set forth in SEQ ID No:347. In a preferred embodiment an mRNA transcribed from said gene comprises an mRNA target region having substantial homology to an mRNA target region set forth in SEQ ID No: 179.

[0085] The gene herein after referred to as “MOST2 protein” (or alternatively as MOST2) is well-known in the art. (For a non-limiting example, see GenBank Accession NM_{—}020250, herein incorporated by reference.) As used herein, the term “MOST2 protein” (as well as MOST2) refers to a gene capable of transcribing an mRNA transcript having substantial homology with an mRNA transcribed from the gene for the MOST2 protein set forth in SEQ ID No:348. In a preferred embodiment an mRNA transcribed from said gene comprises an mRNA target region having substantial homology to an mRNA target region set forth in SEQ ID No: 180.

[0086] The gene herein after referred to as “SRY (Sex determining Region Y)-box 7” (or alternatively as SOX7) is well-known in the art. (For a non-limiting example, see GenBank Accession NM_{—}031439, herein incorporated by reference.) As used herein, the term “SRY (Sex determining Region Y)-box 7” (as well as SOX7) refers to a gene capable of transcribing an mRNA transcript having substantial homology with an mRNA transcribed from the gene for the SRY (Sex determining Region Y)-box 7 set forth in SEQ ID No:349. In a preferred embodiment an mRNA transcribed from said gene comprises an mRNA target region having substantial homology to an mRNA target region set forth in SEQ ID No: 181.

[0087] The gene herein after referred to as “integrin beta 1 subunit” (or alternatively as Integrin B1) is well-known in the art. (For a non-limiting example, see GenBank Accession X07979, herein incorporated by reference.) As used herein, the term “integrin beta 1 subunit” (as well as Integrin B1) refers to a gene capable of transcribing an mRNA transcript having substantial homology with an mRNA transcribed from the gene for the integrin beta 1 subunit set forth in SEQ ID No:350. In a preferred embodiment an mRNA transcribed from said gene comprises an mRNA target region having substantial homology to an mRNA target region set forth in SEQ ID No:182.

[0088] The gene herein after referred to as “desmin” (or alternatively as DES) is well-known in the art. (For a non-limiting example, see GenBank Accession NM_{—}001927, herein incorporated by reference.) As used herein, the term “desmin” (as well as DES) refers to a gene capable of transcribing an mRNA transcript having substantial homology with an mRNA transcribed from the gene for the desmin set forth in SEQ ID No:351. In a preferred embodiment an mRNA transcribed from said gene comprises an mRNA target region having substantial homology to an mRNA target region set forth in SEQ ID No:183.

[0089] The gene herein after referred to as “protection of telomeres 1” (or alternatively as POT1) is well-known in the art. (For a non-limiting example, see GenBank Accession NM_{—}015450, herein incorporated by reference.) As used herein, the term “protection of telomeres 1” (as well as POT1) refers to a gene capable of transcribing an mRNA transcript having substantial homology with an mRNA transcribed from the gene for the protection of telomeres 1 set forth in SEQ ID No:352. In a preferred embodiment an mRNA transcribed from said gene comprises an mRNA target region having substantial homology to an mRNA target region set forth in one or more of SEQ ID Nos:″184 and 195.

[0090] The gene herein after referred to as “H2.0-like homeo box 1” (or alternatively as HDX1) is well-known in the art. (For a non-limiting example, see GenBank Accession NM_{—}021958, herein incorporated by reference.) As used herein, the term “H2.0-like homeo box 1” (as well as HLX1) refers to a gene capable of transcribing an mRNA transcript having substantial homology with an mRNA transcribed from the gene for the H2.0-like homeo box 1 set forth in SEQ ID No:353. In a preferred embodiment an mRNA transcribed from said gene comprises an mRNA target region having substantial homology to an mRNA target region set forth in SEQ ID No: 186.

[0091] The gene herein after referred to as “GABA transport protein” (or alternatively as GABA Transport protein) is well-known in the art. (For a non-limiting example, see GenBank Accession U76343, herein incorporated by reference.) As used herein, the term “GABA transport protein” (as well as GABA Transport protein) refers to a gene capable of transcribing an mRNA transcript having substantial homology with an mRNA transcribed from the gene for the GABA transport protein set forth in SEQ ID No:354. In a preferred embodiment an mRNA transcribed from said gene comprises an mRNA target region having substantial homology to an mRNA target region set forth in SEQ ID No: 187.

[0092] The gene herein after referred to as “v-myc myelocytomatosis viral related oncogene neuroblastoma derived” (or alternatively as V-myc or MYCN) is well-known in the art. (For a non-limiting example, see GenBank Accession NM_{—}005378, herein incorporated by reference.) As used herein, the term “v-myc myelocytomatosis viral related oncogene neuroblastoma derived” (as well as V-myc or MYCN) refers to a gene capable of transcribing an mRNA transcript having substantial homology with an mRNA transcribed from the gene for the v-myc myelocytomatosis viral related oncogene neuroblastoma derived set forth in SEQ ID No:355. In a preferred embodiment an mRNA transcribed from said gene comprises an mRNA target region having substantial homology to an mRNA target region set forth in SEQ ID No: 188.

[0093] The gene herein after referred to as “BAG-family molecular chaperone regulator-5” (or alternatively as BAG5) is well-known in the art. (For a non-limiting example, see GenBank Accession AF095195, herein incorporated by reference.) As used herein, the term “BAG-family molecular chaperone regulator-6” (as well as BAG5) refers to a gene capable of transcribing an mRNA transcript having substantial homology with an mRNA transcribed from the gene for the BAG-family molecular chaperone regulator-5 set forth in SEQ ID No:356. In a preferred embodiment an mRNA transcribed from said gene comprises an mRNA target region having substantial homology to an mRNA target region set forth in SEQ ID No: 189.

[0094] The gene herein after referred to as “Human placental bone morphogenic protein” (or alternatively as PLAB) is well-known in the art. (For a non-limiting example, see GenBank Accession U88323, herein incorporated by reference.) As used herein, the term “Human placental bone morphogenic protein” (as well as PLAB) refers to a gene capable of transcribing an mRNA transcript having substantial homology with an mRNA transcribed from the gene for the Human placental bone morphogenic protein set forth in SEQ ID No:357. In a preferred embodiment an mRNA transcribed from said gene comprises an mRNA target region having substantial homology to an mRNA target region set forth in SEQ ID No: 190.

[0095] The gene herein after referred to as “retinoblastoma-associated factor 600” (or alternatively as BAF600) is well-known in the art. (For a non-limiting example, see GenBank Accession AF348492, herein incorporated by reference.) As used herein, the term “retinoblastoma-associated factor 600” (as well as BAF600) refers to a gene capable of transcribing an mRNA transcript having substantial homology with an mRNA transcribed from the gene for the retinoblastoma-associated factor 600 set forth in SEQ ID No:358. In a preferred embodiment an mRNA transcribed from said gene comprises an mRNA target region having substantial homology to an mRNA target region set forth in SEQ ID No: 191.

[0096] The gene herein after referred to as “ALK-4” (or alternatively as ALK-4) is well-known in the art. (For a non-limiting example, see GenBank Accession Z22536, herein incorporated by reference.) As used herein, the term “ALK-4” (as well as ALK-4) refers to a gene capable of transcribing an mRNA transcript having substantial homology with an mRNA transcribed from the gene for the ALK-4 set forth in SEQ ID No:359. In a preferred embodiment an mRNA transcribed from said gene comprises an mRNA target region having substantial homology to an mRNA target region set forth in SEQ ID No: 192.

[0097] The gene herein after referred to as “tolloid-like 2” (or alternatively as TLL2, is well-known in the art. (For a non-limiting example, see GenBank Accession NM_{—}012465, herein incorporated by reference.) As used herein, the term “tolloid-like 2” (as well as TLL2) refers to a gene capable of transcribing an mRNA transcript having substantial homology with an mRNA transcribed from the gene for the tolloid-like 2 set forth in SEQ ID No:360. In a preferred embodiment an mRNA transcribed from said gene comprises an mRNA target region having substantial homology to an mRNA target region set forth in SEQ ID No: 193.

[0098] The gene herein after referred to as “RIGB” (or alternatively as RIGB) is well-known in the art. (For a non-limiting example, see GenBank Accession AF525085, herein incorporated by reference.) As used herein, the term “RIGB” (as well as RIGB) refers to a gene capable of transcribing an mRNA transcript having substantial homology with an mRNA transcribed from the gene for the RIGB set forth in SEQ ID No:361. In a preferred embodiment an mRNA transcribed from said gene comprises an mRNA target region having substantial homology to an mRNA target region set forth in SEQ ID No: 194.

[0099] The gene herein after referred to as “Human DNA repair helicase” (or alternatively as ERCC3) is well-known in the art. (For a non-limiting example, see GenBank Accession M31899, herein incorporated by reference.) As used herein, the term “Human DNA repair helicase” (as well as ERCC3) refers to a gene capable of transcribing an mRNA transcript having substantial homology with an mRNA transcribed from the gene for the Human DNA repair helicase set forth in SEQ ID No:362. In a preferred embodiment an mRNA transcribed from said gene comprises an mRNA target region having substantial homology to an mRNA target region set forth in SEQ ID No: 196.

[0100] The gene herein after referred to as “T-box 22” (or alternatively as TBX22) is well-known in the art. (For a non-limiting example, see GenBank Accession NM_{—}016954, herein incorporated by reference.) As used herein, the term “T-box 22” (as well as TBX22) refers to a gene capable of transcribing an mRNA transcript having substantial homology with an mRNA transcribed from the gene for the T-box 22 set forth in SEQ ID No:363. In a preferred embodiment an mRNA transcribed from said gene comprises an mRNA target region having substantial homology to an mRNA target region set forth in SEQ ID No: 197.

[0101] The gene herein after referred to as “BRCA1 associated protein 1” (or alternatively as BAP1) is well-known in the art. (For a non-limiting example, see GenBank Accession AF046581, herein incorporated by reference.) As used herein, the term “BRCA1 associated protein 1” (as well as BAP1) refers to a gene capable of transcribing an mRNA transcript having substantial homology with an mRNA transcribed from the gene for the BRCA1 associated protein 1 set forth in SEQ ID No:364. In a preferred embodiment an mRNA transcribed from said gene comprises an mRNA target region having substantial homology to an mRNA target region set forth in SEQ ID No: 198.

[0102] The gene herein after referred to as “Sp3 transcription factor” (or alternatively as SP3(J)) is well-known in the art. (For a non-limiting example, see GenBank Accession NM_{—}003111, herein incorporated by reference.) As used herein, the term “Sp3 transcription factor” (as well as SP3(J)) refers to a gene capable of transcribing an mRNA transcript having substantial homology with an mRNA transcribed from the gene for the Sp3 transcription factor set forth in SEQ ID No:365. In a preferred embodiment an mRNA transcribed from said gene comprises an mRNA target region having substantial homology to an mRNA target region set forth in SEQ ID No: 199.

[0103] The gene herein after referred to as “TEF-1 gene” (or alternatively as TEF1(D)) is well-known in the art. (For a non-limiting example, see GenBank Accession X84839, herein incorporated by reference.) As used herein, the term “TEF-1 gene” (as well as TEF1(D)) refers to a gene capable of transcribing an mRNA transcript having substantial homology with an mRNA transcribed from the gene for the TEF-1 gene set forth in SEQ ID No:366. In a preferred embodiment an mRNA transcribed from said gene comprises an mRNA target region having substantial homology to an mRNA target region set forth in SEQ ID No: 201.

[0104] The gene herein after referred to as “forkhead box A3” (or alternatively as FOXA3) is well-known in the art. (For a non-limiting example, see GenBank Accession NM_{—}004497, herein incorporated by reference.) As used herein, the term “forkhead box A3” (as well as FOXA3) refers to a gene capable of transcribing an mRNA transcript having substantial homology with an mRNA transcribed from the gene for the forkhead boxA3 set forth in SEQ ID No:367. In a preferred embodiment an mRNA transcribed from said gene comprises an mRNA target region having substantial homology to an mRNA target region set forth in one or more of SEQ ID Nos:″202 and 210.

[0105] The gene herein after referred to as “ets family transcription factor ELF2A” (or alternatively as ELF2) is well-known in the art. (For a non-limiting example, see GenBank Accession AF256222, herein incorporated by reference.) As used herein, the term “ets family transcription factor ELF2A” (as well as ELF2) refers to a gene capable of transcribing an mRNA transcript having substantial homology with an mRNA transcribed from the gene for the ets family transcription factor ELF2A set forth in SEQ ID No:368. In a preferred embodiment an mRNA transcribed from said gene comprises an mRNA target region having substantial homology to an mRNA target region set forth in SEQ ID No: 203.

[0106] The gene herein after referred to as “microtubule-associated protein 1A” (or alternatively as MAP1A) is well-known in the art. (For a non-limiting example, see GenBank Accession NM_{—}002373, herein incorporated by reference.) As used herein, the term “microtubule-associated protein 1A” (as well as MAP1A) refers to a gene capable of transcribing an mRNA transcript having substantial homology with an mRNA transcribed from the gene for the microtubule-associated protein 1A set forth in SEQ ID No:369. In a preferred embodiment an mRNA transcribed from said gene comprises an mRNA target region having substantial homology to an mRNA target region set forth in SEQ ID No: 204.

[0107] The gene herein after referred to as “myosin 5B” (or alternatively as Myosin 5B) is well-known in the art. (For a non-limiting example, see GenBank Accession AY274809, herein incorporated by reference.) As used herein, the term “myosin 5B” (as well as Myosin 5B) refers to a gene capable of transcribing an mRNA transcript having substantial homology with an mRNA transcribed from the gene for the myosin 5B set forth in SEQ ID No:370. In a preferred embodiment an mRNA transcribed from said gene comprises an mRNA target region having substantial homology to an mRNA target region set forth in SEQ ID No: 205.

[0108] The gene herein after referred to as “NEDD4-like ubiquitin ligase 1” (or alternatively as NEDL1) is well-known in the art. (For a non-limiting example, see GenBank Accession AB048365, herein incorporated by reference.) As used herein, the term “NEDD4-like ubiquitin ligase 1” (as well as NEDL1) refers to a gene capable of transcribing an mRNA transcript having substantial homology with an mRNA transcribed from the gene for the NEDD4-like ubiquitin ligase 1 set forth in SEQ ID No:371. In a preferred embodiment an mRNA transcribed from said gene comprises an mRNA target region having substantial homology to an mRNA target region set forth in SEQ ID No: 206.

[0109] The gene herein after referred to as “Mint1 mRNA” (or alternatively as MINT1) is well-known in the art. (For a non-limiting example, see GenBank Accession AF029106, herein incorporated by reference.) As used herein, the term “Mint1 mRNA” (as well as MINT1) refers to a gene capable of transcribing an mRNA transcript having substantial homology with an mRNA transcribed from the gene for the Mint1 mRNA set forth in SEQ ID No:372. In a preferred embodiment an mRNA transcribed from said gene comprises an mRNA target region having substantial homology to an mRNA target region set forth in SEQ ID No: 207.

[0110] The gene herein after referred to as “PARX protein” (or alternatively as PARX) is well-known in the art. (For a non-limiting example, see GenBank Accession AF439781, herein incorporated by reference.) As used herein, the term “PARX protein” (as well as PARX) refers to a gene capable of transcribing an mRNA transcript having substantial homology with an mRNA transcribed from the gene for the PARX protein set forth in SEQ ID No:373. In a preferred embodiment an mRNA transcribed from said gene comprises an mRNA target region having substantial homology to an mRNA target region set forth in SEQ ID No: 208.

[0111] The gene herein after referred to as “epidermal growth factor receptor” (or alternatively as ERBB3) is well-known in the art. (or a non-limiting example, see GenBank Accession M29366, herein incorporated by reference.) As used herein, the term “epidermal growth factor receptor” (as well as ERBB3) refers to a gene capable of transcribing an mRNA transcript having substantial homology with an mRNA transcribed from the gene for the epidermal growth factor receptor set forth in SEQ ID No:374. In a preferred embodiment an mRNA transcribed from said gene comprises an mRNA target region having substantial homology to an mRNA target region set forth in SEQ ID No: 209.

[0112] The gene herein after referred to as “matrix metalloproteinase 3” (or alternatively as MMP3) is well-known in the art. (For a non-limiting example, see GenBank Accession AF405705, herein incorporated by reference.) As used herein, the term “matrix metalloproteinase 3” (as well as MMP3) refers to a gene capable of transcribing an mRNA transcript having substantial homology with an mRNA transcribed from the gene for the matrix metalloproteinase 3 (stromelysin 1; progelatinase) set forth in SEQ ID No:376. In a preferred embodiment an mRNA transcribed from said gene comprises an mRNA target region having substantial homology to an mRNA target region set forth in SEQ ID No: 211.

[0113] The gene herein after referred to as “VE-cadherin” (or alternatively as VE-CADHERIN) is well-known in the art. (For a non-limiting example, see GenBank Accession X79981, herein incorporated by reference.) As used herein, the term “VE-cadherin” (as well as VE-CADHERIN) refers to a gene capable of transcribing an m-RNA transcript having substantial homology with an mRNA transcribed from the gene for the VE-cadherin set forth in SEQ ID No:376. In a preferred embodiment an mRNA transcribed from said gene comprises an mRNA target region having substantial homology to an mRNA target region set forth in SEQ ID No: 212.

[0114] The gene herein after referred to as “microtubule-associated protein 2” (or alternatively as MAP2) is well-known in the art. (For a non-limiting example, see GenBank Accession NM_{—}002374, herein incorporated by reference.) As used herein, the term “microtubule-associated protein 2” (as well as MAP2) refers to a gene capable of transcribing an mRNA transcript having substantial homology with an mRNA transcribed from the gene for the microtubule-associated protein 2 set forth in SEQ ID No:377. In a preferred embodiment an mRNA transcribed from said gene comprises an mRNA target region having substantial homology to an mRNA target region set forth in SEQ ID No: 213.

[0115] The gene herein after referred to as “TAF7 RNA polymerase II TATA box binding protein (TBP)-associated factor” (or alternatively as TAFII55 or TAF7) is well-known in the art. (For a non-limiting example, see GenBank Accession NM_{—}005642, herein incorporated by reference.) As used herein, the term “TAF7 RNA polymerase II TATA box binding protein (TBP)-associated factor” (as well as TAFII55 or TAF7) refers to a gene capable of transcribing an mRNA transcript having substantial homology with an mRNA transcribed from the gene for the TAF7 RNA polymerase II TATA box binding protein (TBP)-associated factor set forth in SEQ ID No:378. In a preferred embodiment an mRNA transcribed from said gene comprises an mRNA target region having substantial homology to an mRNA target region set forth in SEQ ID No: 214.

[0116] The gene herein after referred to as “mitochondrial elongation factor G2” (or alternatively as EFG2) is well-known in the art. (or a non-limiting example, see GenBank Accession NM_{—}032380, herein incorporated by reference.) As used herein, the term “mitochondrial elongation factor G2” (as well as EFG2) refers to a gene capable of transcribing an mRNA transcript having substantial homology with an mRNA transcribed from the gene for the mitochondrial elongation factor G2 set forth in SEQ ID No:379. In a preferred embodiment an mRNA transcribed from said gene comprises an mRNA target region having substantial homology to an mRNA target region set forth in SEQ ID No: 215.

[0117] The gene herein after referred to as “eyes absent homolog” (or alternatively as Eab1) is well-known in the art. (For a non-limiting example, see GenBank Accession U71207, herein incorporated by reference.) As used herein, the term “eyes absent homolog” (as well as Eab1) refers to a gene capable of transcribing an mRNA transcript having substantial homology with an mRNA transcribed from the gene for the eyes absent homolog set forth in SEQ ID No:380. In a preferred embodiment an mRNA transcribed from said gene comprises an mRNA target region having substantial homology to an mRNA target region set forth in SEQ ID No: 216.

[0118] The gene herein after referred to as “paired box gene 3” (or alternatively as PAX3) is well-known in the art. (For a non-limiting example, see GenBank Accession NM_{—}181457, herein incorporated by reference.) As used herein, the term “paired box gene 3” (as well as PAX3) refers to a gene capable of transcribing an mRNA transcript having substantial homology with an mRNA transcribed from the gene for the paired box gene 3 set forth in SEQ ID No:381. In a preferred embodiment an mRNA transcribed from said gene comprises an mRNA target region having substantial homology to an mRNA target region set forth in SEQ ID No: 217.

[0119] The gene herein after referred to as “synaptotagmin I” (or alternatively as Synaptotagmin1(D) 3UTR) is well-known in the art. (For a non-limiting example, see GenBank Accession U19921, herein incorporated by reference.) As used herein, the term “synaptotagmin I” (as well as Synaptotagmin1(D) 3UTR) refers to a gene capable of transcribing an mRNA transcript having substantial homology with an mRNA transcribed from the gene for the synaptotagmin I set forth in SEQ ID No:382. In a preferred embodiment an mRNA transcribed from said gene comprises an mRNA target region having substantial homology to an mRNA target region set forth in SEQ ID No: 218.

[0120] The gene herein after referred to as “histone deacetylase 5′ (or alternatively as HDAC5) is well-known in the art. (For a non-limiting example, see GenBank Accession NM_{—}005474, herein incorporated by reference.) As used herein, the term “histone deacetylase 5” (as well as HDAC5) refers to a gene capable of transcribing an mRNA transcript having substantial homology with an mRNA transcribed from the gene for the histone deacetylase 5 set forth in SEQ ID No:383. In a preferred embodiment an mRNA transcribed from said gene comprises an mRNA target region having substantial homology to an mRNA target region set forth in SEQ ID No: 219.

[0121] The gene herein after referred to as “homolog of Drosophila headcase” (or alternatively as hHDC) is well-known in the art. (For a non-limiting example, see GenBank Accession AB033492, herein incorporated by reference.) As used herein, the term “homolog of Drosophila headcase” (as well as hHDC) refers to a gene capable of transcribing an mRNA transcript having substantial homology with an mRNA transcribed from the gene for the homolog of Drosophila headcase set forth in SEQ ID No:384. In a preferred embodiment an mRNA transcribed from said gene comprises an mRNA target region having substantial homology to an mRNA target region set forth in SEQ ID No: 220.

[0122] The gene herein after referred to as “homeo box B8” (or alternatively as HOXB8) is well-known in the art. (For a non-limiting example, see GenBank Accession NM_{—}024016, herein incorporated by reference.) As used herein, the term “homeo box B8” (as well as HOXB8) refers to a gene capable of transcribing an mRNA transcript having substantial homology with an mRNA transcribed from the gene for the homeo box B8 set forth in SEQ ID No:385. In a preferred embodiment an mRNA transcribed from said gene comprises an mRNA target region having substantial homology to an mRNA target region set forth in SEQ ID No: 221.

[0123] The gene herein after referred to as “fyn-related kinase” (or alternatively as FRK) is well-known in the art. (For a non-limiting example, see GenBank Accession NM_{—}002031, herein incorporated by reference.) As used herein, the term “fyn-related kinase” (as well as FRK) refers to a gene capable of transcribing an mRNA transcript having substantial homology with an mRNA transcribed from the gene for the fyn-related kinase set forth in SEQ ID No:386. In a preferred embodiment an mRNA transcribed from said gene comprises an mRNA target region having substantial homology to an mRNA target region set forth in SEQ ID No: 222.

[0124] The gene herein after referred to as “TGF-beta/activin signal transducer FAST-1p” (or alternatively as FAST1) is well-known in the art. (For a non-limiting example, see GenBank Accession AF076292, herein incorporated by reference.) As used herein, the term “TGF-beta/activin signal transducer FAST-1p” (as well as FAST1) refers to a gene capable of transcribing an mRNA transcript having substantial homology with an mRNA transcribed from the gene for the TGF-beta/activin signal transducer FAST-1p set forth in SEQ ID No:387. In a preferred embodiment an mRNA transcribed from said gene comprises an mRNA target region having substantial homology to an mRNA target region set forth in SEQ ID No: 223.

[0125] The gene herein after referred to as “La autoantigen” (or alternatively as La antigen) is well-known in the art. (For a non-limiting example, see GenBank Accession X97869, herein incorporated by reference.) As used herein, the term “La autoantigen” (as well as La antigen) refers to a gene capable of transcribing an mRNA transcript having substantial homology with an mRNA transcribed from the gene for the La autoantigen set forth in SEQ ID No:388. In a preferred embodiment an mRNA transcribed from said gene comprises an mRNA target region having substantial homology to an miRNA target region set forth in SEQ ID No: 224.

[0126] The gene herein after referred to as “mutL homolog 1” (or alternatively as MLH1) is well-known in the art. Nor a non-limiting example, see GenBank Accession NM_{—}000249, herein incorporated by reference.) As used herein, the term “mutL homolog 1” (as well as MLH1) refers to a gene capable of transcribing an mRNA transcript having substantial homology with an mRNA transcribed from the gene for the mutL homolog 1 set forth in SEQ ID No:389. In a preferred embodiment an mRNA transcribed from said gene comprises an mRNA target region having substantial homology to an mRNA target region set forth in SEQ ID No: 225.

[0127] The gene herein after referred to as “E74-like factor 3” (or alternatively as ELF3) is well-known in the art. (For a non-limiting example, see GenBank Accession AF517841, herein incorporated by reference.) As used herein, the term “E74-like factor 3” (as well as ELF3) refers to a gene capable of transcribing an mRNA transcript having substantial homology with an mRNA transcribed from the gene for the E74-like factor 3 set forth in SEQ ID No:390. In a preferred embodiment an mRNA transcribed from said gene comprises an mRNA target region having substantial homology to an mRNA target region set forth in SEQ ID No: 226.

[0128] The gene herein after referred to as “B-myb gene” (or alternatively as B-Myb) is well-known in the art. (For a non-limiting example, see GenBank Accession X13293, herein incorporated by reference.) As used herein, the term “B-myb gene” (as well as B-Myb) refers to a gene capable of transcribing an mRNA transcript having substantial homology with an mRNA transcribed from the gene for the B-myb gene set forth in SEQ ID No:391. In a preferred embodiment an mRNA transcribed from said gene comprises an mRNA target region having substantial homology to an mRNA target region set forth in one or more of SEQ ID Nos:″227 and 259.

[0129] The gene herein after referred to as “a-myb mRNA” (or alternatively as a-myb) is well-known in the art. (For a non-limiting example, see GenBank Accession X66087, herein incorporated by reference.) As used herein, the term “a-myb mRNA” (as well as a-myb) refers to a gene capable of transcribing an mRNA transcript having substantial homology with an mRNA transcribed from the gene for the a-myb mRNA set forth in SEQ ID No:392. In a preferred embodiment an mRNA transcribed from said gene comprises an mRNA target region having substantial homology to an mRNA target region set forth in SEQ ID No: 228.

[0130] The gene herein after referred to as “jagged 1” (or alternatively as JAG1) is well-known in the art. (For a non-limiting example, see GenBank Accession NM_{—}000214, herein incorporated by reference.) As used herein, the term “jagged 1” (as well as JAG1) refers to a gene capable of transcribing an mRNA transcript having substantial homology with an mRNA transcribed from the gene for the jagged 1 set forth in SEQ ID No:393. In a preferred embodiment an mRNA transcribed from said gene comprises an mRNA target region having substantial homology to an mRNA target region set forth in SEQ ID No: 229.

[0131] The gene herein after referred to as “homeobox protein SHOTb” (or alternatively as SHOTB) is well-known in the art. (For a non-limiting example, see GenBank Accession AJ002368, herein incorporated by reference.) As used herein, the term “homeobox protein SHOTb” (as well as SHOTb) refers to a gene capable of transcribing an mRNA transcript having substantial homology with an mRNA transcribed from the gene for the homeobox protein SHOTb set forth in SEQ ID No:394. In a preferred embodiment an mRNA transcribed from said gene comprises an mRNA target region having substantial homology to an mRNA target region set forth in SEQ ID No: 230.

[0132] The gene herein after referred to as “death-associated protein kinase 3” (or alternatively as DAPK3) is well-known in the art. (For a non-limiting example, see GenBank Accession NM_{—}001348, herein incorporated by reference.) As used herein, the term “death-associated protein kinase 3” (as well as DAPK3) refers to a gene capable of transcribing an mRNA transcript having substantial homology with an mRNA transcribed from the gene for the death-associated protein kinase 3 set forth in SEQ ID No:395. In a preferred embodiment an mRNA transcribed from said gene comprises an mRNA target region having substantial homology to an mRNA target region set forth in SEQ ID No: 231.

[0133] The gene herein after referred to as “RAD51 homolog” (or alternatively as RecA homolog or RAD51) is well-known in the art. (For a non-limiting example, see GenBank Accession NM_{—}002875, herein incorporated by reference.) As used herein, the term D51 homolog” (as well as RecA homolog or RAD51) refers to a gene capable of transcribing an mRNA transcript having substantial homology with an mRNA transcribed from the gene for the RAD51 homolog (RecA homolog or RAD51) set forth in SEQ ID No:396. In a preferred embodiment an mRNA transcribed from said gene comprises an mRNA target region having substantial homology to an mRNA target region set forth in SEQ ID No: 232.

[0134] The gene herein after referred to as “methyl-CpG binding endonuclease” (or alternatively as MED1) is well-known in the art. (For a non-limiting example, see GenBank Accession AF114784, herein incorporated by reference.) As used herein, the term “methyl-CpG binding endonuclease” (as well as MED1) refers to a gene capable of transcribing an mRNA transcript having substantial homology with an mRNA transcribed from the gene for the methyl-CpG binding endonuclease set forth in SEQ ID No:397. In a preferred embodiment an mRNA transcribed from said gene comprises an mRNA target region having substantial homology to an mRNA target region set forth in SEQ ID No: 233.

[0135] The gene herein after referred to as “HUS1 checkpoint homolog” (or alternatively as HUS1) is well-known in the art. (For a non-limiting example, see GenBank Accession NM_{—}004507, herein incorporated by reference.) As used herein, the term “HUS1 checkpoint homolog” (as well as HUS1) refers to a gene capable of transcribing an mRNA transcript having substantial homology with an mRNA transcribed from the gene for the HUS1 checkpoint homolog set forth in SEQ ID No:398. In a preferred embodiment an mRNA transcribed from said gene comprises an mRNA target region having substantial homology to an mRNA target region set forth in SEQ ID No: 234.

[0136] The gene herein after referred to as “Human homolog of ES1” (or alternatively as HES1 (Y07572)) is well-known in the art. (For a non-limiting example, see GenBank Accession Y07572, herein incorporated by reference.) As used herein, the term “Human homolog of ES1” (as well as HES1 (Y07572)) refers to a gene capable of transcribing an mRNA transcript having substantial homology with an mRNA transcribed from the gene for Human homolog of ES1 set forth in SEQ ID No:399. In a preferred embodiment an mRNA transcribed from said gene comprises an mRNA target region having substantial homology to an mRNA target region set forth in SEQ ID No: 11.

[0137] The gene herein after referred to as “caldesmon 1” (or alternatively as CALDESMON or CALD1) is well-known in the art. (For a non-limiting example, see GenBank Accession NM_{—}033138, herein incorporated by reference.) As used herein, the term “caldesmon 1” (as well as CALDESMON or CALD1) refers to a gene capable of transcribing an mRNA transcript having substantial homology with an mRNA transcribed from the gene for the caldesmon 1 set forth in SEQ ID No:400. In a preferred embodiment an mRNA transcribed from said gene comprises an mRNA target region having substantial homology to an mRNA target region set forth in SEQ ID No: 235.

[0138] The gene herein after referred to as “VENT-like homeobox 2” (or alternatively as VENTX2) is well-known in the art. (For a non-limiting example, see GenBank Accession NM_{—}014468, herein incorporated by reference.) As used herein, the term “VENT-like homeobox 2” (as well as VENTX2) refers to a gene capable of transcribing an mRNA transcript having substantial homology with an mRNA transcribed from the gene for the VENT-like homeobox 2 set forth in SEQ ID No:401. In a preferred embodiment an mRNA transcribed from said gene comprises an mRNA target region having substantial homology to an mRNA target region set forth in SEQ ID No: 236.

[0139] The gene herein after referred to as “early growth response 2 protein” (or alternatively as EGR2) is well-known in the art. (For a non-limiting example, see GenBank Accession J04076, herein incorporated by reference.) As used herein, the term “early growth response 2 protein” (as well as EGR2) refers to a gene capable of transcribing an mRNA transcript having substantial homology with an mRNA transcribed from the gene for the early growth response 2 protein set forth in SEQ ID No:402. In a preferred embodiment an mRNA transcribed from said gene comprises an mRNA target region having substantial homology to an mRNA target region set forth in SEQ ID No: 237.

[0140] The gene herein after referred to as “Notch3” (or alternatively as NOTCH3) is well-known in the art. (For a non-limiting example, see GenBank Accession U97669, herein incorporated by reference.) As used herein, the term “Notch3” (as well as NOTCH3) refers to a gene capable of transcribing an mRNA transcript having substantial homology with an mRNA transcribed from the gene for the Notch3 set forth in SEQ ID No:403. In a preferred embodiment an mRNA transcribed from said gene comprises an mRNA target region having substantial homology to an mRNA target region set forth in SEQ ID No: 238.

[0141] The gene herein after referred to as “lin-28 homolog” (or alternatively as Lin28) is well-known in the art. (For a non-limiting example, see GenBank Accession NM_{—}024674, herein incorporated by reference.) As used herein, the term “lin-28 homolog” (as well as Lin28) refers to a gene capable of transcribing an mRNA transcript having substantial homology with an mRNA transcribed from the gene for the lin-28 homolog set forth in SEQ ID No:404. In a preferred embodiment an mRNA transcribed from said gene comprises an mRNA target region having substantial homology to an mRNA target region set forth in SEQ ID No: 239.

[0142] The gene herein after referred to as “PML-3” (or alternatively as PML3) is well-known in the art. (For a non-limiting example, see GenBank Accession M79464, herein incorporated by reference.) As used herein, the term “PML-3” (as well as PML3) refers to a gene capable of transcribing an mRNA transcript having substantial homology with an mRNA transcribed from the gene for the PML-3 set forth in SEQ ID No:405. In a preferred embodiment an mRNA transcribed from said gene comprises an mRNA target region having substantial homology to an mRNA target region set forth in SEQ ID No: 240.

[0143] The gene herein after referred to as “c-myc binding protein” (or alternatively as MYCBP) is well-known in the art. (For a non-limiting example, see GenBank Accession NM_{—}012333, herein incorporated by reference.) As used herein, the term “c-myc binding protein” (as well as MYCBP) refers to a gene capable of transcribing an mRNA transcript having substantial homology with an mRNA transcribed from the gene for the c-myc binding protein set forth in SEQ ID No:406. In a preferred embodiment an mRNA transcribed from said gene comprises an mRNA target region having substantial homology to an mRNA target region set forth in SEQ ID No: 241.

[0144] The gene herein after referred to as “transducer of ERBB2 1” (or alternatively as TOB1) is well-known in the art. (For a non-limiting example, see GenBank Accession NM_{—}005749, herein incorporated by reference.) As used herein, the term “transducer of ERBB2 1” (as well as TOB1) refers to a gene capable of transcribing an mRNA transcript having substantial homology with an mRNA transcribed from the gene for the transducer of ERBB2 1 set forth in SEQ ID No:407. In a preferred embodiment an mRNA transcribed from said gene comprises an mRNA target region having substantial homology to an mRNA target region set forth in SEQ ID No: 242.

[0145] The gene herein after referred to as “neuron navigator 3” (or alternatively as NAV3) is well-known in the art. (For a non-limiting example, see GenBank Accession NM_{—}014903, herein incorporated by reference.) As used herein, the term “neuron navigator 3” (as well as NAV3) refers to a gene capable of transcribing an mRNA transcript having substantial homology with an mRNA transcribed from the gene for the neuron navigator 3 set forth in SEQ ID No:408. In a preferred embodiment an mRNA transcribed from said gene comprises an mRNA target region having substantial homology to an mRNA target region set forth in SEQ ID No: 243.

[0146] The gene herein after referred to as “multiple asters 1” (or alternatively as MAST1) is well-known in the art. (For a non-limiting example, see GenBank Accession AF347693, herein incorporated by reference.) As used herein, the term “multiple asters 1” (as well as MAST1) refers to a gene capable of transcribing an mRNA transcript having substantial homology with an mRNA transcribed from the gene for the multiple asters 1 set forth in SEQ ID No:409. In a preferred embodiment an mRNA transcribed from said gene comprises an mRNA target region having substantial homology to an mRNA target region set forth in SEQ ID No: 244.

[0147] The gene herein after referred to as “headcase homolog” (or alternatively as HECA) is well-known in the art. (For a non-limiting example, see GenBank Accession NM_{—}016217, herein incorporated by reference.) As used herein, the term “headcase homolog” (as well as HECA) refers to a gene capable of transcribing an mRNA transcript having substantial homology with an mRNA transcribed from the gene for the headcase homolog set forth in SEQ ID No:410. In a preferred embodiment an mRNA transcribed from said gene comprises an mRNA target region having substantial homology to an mRNA target region set forth in SEQ ID No: 245.

[0148] The gene herein after referred to as “microtubule-associated protein 6” (or alternatively as MAP6) is well-known in the art. (For a non-limiting example, see GenBank Accession XM_{—}166256, herein incorporated by reference.) As used herein, the term “microtubule-associated protein 6” (as well as MAP6) refers to a gene capable of transcribing an mRNA transcript having substantial homology with an mRNA transcribed from the gene for the microtubule-associated protein 6 set forth in SEQ ID No:411. In a preferred embodiment an mRNA transcribed from said gene comprises an mRNA target region having substantial homology to an mRNA target region set forth in SEQ ID No: 246.

[0149] The gene herein after referred to as “methyl-CpG binding domain protein 1” (or alternatively as MBD1) is well-known in the art. (For a non-limiting example, see GenBank Accession NM_{—}015846, herein incorporated by reference.) As used herein, the term “methyl-CpG binding domain protein 1” (as well as MBD1) refers to a gene capable of transcribing an mRNA transcript having substantial homology with an mRNA transcribed from the gene for the methyl-CpG binding domain protein 1 set forth in SEQ ID No:412. In a preferred embodiment an mRNA transcribed from said gene comprises an mRNA target region having substantial homology to an mRNA target region set forth in SEQ ID No: 247.

[0150] The gene herein after referred to as “EphA5” (or alternatively as EPHA5) is well-known in the art. (For a non-limiting example, see GenBank Accession NM_{—}004439, herein incorporated by reference.) As used herein, the term “EphA5” (as well as EPHA5) refers to a gene capable of transcribing an mRNA transcript having substantial homology with an mRNA transcribed from the gene for the EphA5 set forth in SEQ ID No:413. In a preferred embodiment an mRNA transcribed from said gene comprises an mRNA target region having substantial homology to an mRNA target region set forth in SEQ ID No: 248.

[0151] The gene herein after referred to as “polymerase (RNA) III” (or alternatively as RPC32) is well-known in the art. (For a non-limiting example, see GenBank Accession NM_{—}006467, herein incorporated by reference.) As used herein, the term “polymerase (RNA) I” (as well as RPC32) refers to a gene capable of transcribing an mRNA transcript having substantial homology with an mRNA transcribed from the gene for the polymerase (RNA) m (DNA directed) set forth in SEQ ID No:414. In a preferred embodiment an mRNA transcribed from said gene comprises an mRNA target region having substantial homology to an mRNA target region set forth in SEQ ID No: 249.

[0152] The gene herein after referred to as “neuro-oncological ventral antigen 1” (or alternatively as NOVA1) is well-known in the art. (For a non-limiting example, see GenBank Accession NM_{—}002515, herein incorporated by reference.) As used herein, the term “neuro-oncological ventral antigen 1” (as well as NOVA1) refers to a gene capable of transcribing an mRNA transcript having substantial homology with an mRNA transcribed from the gene for the neuro-oncological ventral antigen 1 set forth in SEQ ID No:415. In a preferred embodiment an mRNA transcribed from said gene comprises an mRNA target region having substantial homology to an mRNA target region set forth in SEQ ID No: 250.

[0153] The gene herein after referred to as “activating transcription factor 1” (or alternatively as ATF1) is well-known in the art. (For a non-limiting example, see GenBank Accession NM_{—}005171, herein incorporated by reference.) As used herein, the term “activating transcription factor 1” (as well as ATF1) refers to a gene capable of transcribing an mRNA transcript having substantial homology with an mRNA transcribed from the gene for the activating transcription factor 1 set forth in SEQ ID No:416. In a preferred embodiment an mRNA transcribed from said gene comprises an mRNA target region having substantial homology to an mRNA target region set forth in SEQ ID No: 251.

[0154] The gene herein after referred to as “interphotoreceptor retinoid-binding protein” (or alternatively as IRBP) is well-known in the art. (For a non-limiting example, see GenBank Accession M22453, herein incorporated by reference.) As used herein, the term “interphotoreceptor retinoid-binding protein” (as well as IRBP) refers to a gene capable of transcribing an mRNA transcript having substantial homology with an mRNA transcribed from the gene for the interphotoreceptor retinoid-binding protein set forth in SEQ ID No:417. In a preferred embodiment an mRNA transcribed from said gene comprises an mRNA target region having substantial homology to an mRNA target region set forth in SEQ ID No: 252.

[0155] The gene herein after referred to as “E2F transcription factor 3” (or alternatively as E2F3) is well-known in the art. (For a non-limiting example, see GenBank Accession NM_{—}001949, herein incorporated by reference.) As used herein, the term “E2F transcription factor 3” (as well as E2F3) refers to a gene capable of transcribing an mRNA transcript having substantial homology with an mRNA transcribed from the gene for the E2F transcription factor 3 set forth in SEQ ID No:418. In a preferred embodiment an mRNA transcribed from said gene comprises an mRNA target region having substantial homology to an mRNA target region set forth in SEQ ID No: 253.

[0156] The gene herein after referred to as “mesoderm specific transcript homolog” (or alternatively as MEST) is well-known in the art. (For a non-limiting example, see GenBank Accession NM_{—}002402, herein incorporated by reference.) As used herein, the term “mesoderm specific transcript homolog” (as well as MEST) refers to a gene capable of transcribing an mRNA transcript having substantial homology with an mRNA transcribed from the gene for the mesoderm specific transcript homolog set forth in SEQ ID No:419. In a preferred embodiment an mRNA transcribed from said gene comprises an mRNA target region having substantial homology to an mRNA target region set forth in SEQ ID No: 254.

[0157] The gene herein after referred to as “bone morphogenetic protein 3” (or alternatively as BMP3) is well-known in the art. (For a non-limiting example, see GenBank Accession NM_{—}001201, herein incorporated by reference.) As used herein, the term “bone morphogenetic protein 3” (as well as BM3) refers to a gene capable of transcribing an mRNA transcript having substantial homology with an mRNA transcribed from the gene for the bone morphogenetic protein 3 (osteogenic) set forth in SEQ ID No:420. In a preferred embodiment an mRNA transcribed from said gene comprises an mRNA target region having substantial homology to an mRNA target region set forth in SEQ ID No: 255.

[0158] The gene herein after referred to as “EphA3” (or alternatively as EPHA3) is well-known in the art. (For a non-limiting example, see GenBank Accession NM_{—}005233, herein incorporated by reference.) As used herein, the term “EphA3” (as well as EPHA3) refers to a gene capable of transcribing an mRNA transcript having substantial homology with an mRNA transcribed from the gene for the EphA3 set forth in SEQ ID No:421. In a preferred embodiment an mRNA transcribed from said gene comprises an mRNA target region having substantial homology to an mRNA target region set forth in SEQ ID No: 256.

[0159] The gene herein after referred to as “methyl-CpG binding domain protein 6” (or alternatively as MBD5) is well-known in the art. (For a non-limiting example, see GenBank Accession NM_{—}018328, herein incorporated by reference.) As used herein, the term “methyl-CpG binding domain protein 6” (as well as MBD5) refers to a gene capable of transcribing an mRNA transcript having substantial homology with an mRNA transcribed from the gene for the methyl-CpG binding domain protein 5 set forth in SEQ ID No:422. In a preferred embodiment an mRNA transcribed from said gene comprises an mRNA target region having substantial homology to an mRNA target region set forth in SEQ ID No: 257.

[0160] The gene herein after referred to as “fibroblast growth factor 12” (or alternatively as FGF12) is well-known in the art. (For a non-limiting example, see GenBank Accession NM_{—}021032, herein incorporated by reference.) As used herein, the term “fibroblast growth factor 12” (as well as FGF12) refers to a gene capable of transcribing an mRNA transcript having substantial homology with an mRNA transcribed from the gene for the fibroblast growth factor 12 set forth in SEQ ID No:423. In a preferred embodiment an mRNA transcribed from said gene comprises an mRNA target region having substantial homology to an mRNA target region set forth in SEQ ID No: 258.

[0161] The gene herein after referred to as “RNA helicase A” (or alternatively as RNA helicase A) is well-known in the art. (or a non-limiting example, see GenBank Accession L13848, herein incorporated by reference.) As used herein, the term “RNA helicase A” (as well as RNA helicase A) refers to a gene capable of transcribing an mRNA transcript having substantial homology with an mRNA transcribed from the gene for the RNA helicase A set forth in SEQ ID No:424. In a preferred embodiment an mRNA transcribed from said gene comprises an mRNA target region having substantial homology to an mRNA target region set forth in SEQ ID No: 260.

[0162] The gene herein after referred to as “matrix metalloproteinase 26” (or alternatively as MMP26) is well-known in the art. (For a non-limiting example, see GenBank Accession NO₂₁₈₀₁, herein incorporated by reference.) As used herein, the term “matrix metalloproteinase 26” (as well as MMP26) refers to a gene capable of transcribing an mRNA transcript having substantial homology with an mRNA transcribed from the gene for the matrix metalloproteinase 26 set forth in SEQ ID No:425. In a preferred embodiment an mRNA transcribed from said gene comprises an mRNA target region having substantial homology to an mRNA target region set forth in SEQ ID No: 261.

[0163] The gene herein after referred to as “crossveinless-2” (or alternatively as Crossveinless-2) is well-known in the art. (For a non-limiting example, see GenBank Accession AY324650, herein incorporated by reference.) As used herein, the term “crossveinless-2” (as well as Crossveinless-2) refers to a gene capable of transcribing an mRNA transcript having substantial homology with an mRNA transcribed from the gene for the crossveinless-2 set forth in SEQ ID No:426. In a preferred embodiment an mRNA transcribed from said gene comprises an mRNA target region having substantial homology to an mRNA target region set forth in SEQ ID No: 262.

[0164] The gene herein after referred to as “cadherin 5 type 2 VE-cadherin” (or alternatively as CADHERIN5 or CDH5) is well-known in the art. (For a non-limiting example, see GenBank Accession NM_{—}001795, herein incorporated by reference.) As used herein, the term “cadherin 5 type 2 VE-cadherin” (as well as CADHERIN5 or CDH5) refers to a gene capable of transcribing an mRNA transcript having substantial homology with an mRNA transcribed from the gene for the cadherin 5 type 2 VE-cadherin (vascular epithelium) set forth in SEQ ID No:427. In a preferred embodiment an mRNA transcribed from said gene comprises an mRNA target region having substantial homology to an mRNA target region set forth in. SEQ ID No: 263.

[0165] The gene herein after referred to as “eukaryotic translation initiation factor 4A” (or alternatively as EIF4AI) is well-known in the art. (For a non-limiting example, see GenBank Accession NM_{—}001416, herein incorporated by reference.) As used herein, the term “eukaryotic translation initiation factor 4A” (as well as EIF4AI) refers to a gene capable of transcribing an mRNA transcript having substantial homology with an mRNA transcribed from the gene for the eukaryotic translation initiation factor 4A set forth in SEQ ID No:428. In a preferred embodiment an mRNA transcribed from said gene comprises an mRNA target region having substantial homology to an mRNA target region set forth in SEQ ID No: 264.

[0166] The gene herein after referred to as “TWEAK” (or alternatively as TWEAK) is well-known in the art. (For a non-limiting example, see GenBank Accession AF030099, herein incorporated by reference.) As used herein, the term “TWEAK” (as well as TWEAK) refers to a gene capable of transcribing an mRNA transcript having substantial homology with an mRNA transcribed from the gene for the TWEAK set forth in SEQ ID No:429. In a preferred embodiment an mRNA transcribed from said gene comprises an mRNA target region having substantial homology to an mRNA target region set forth in SEQ ID No: 265.

[0167] The gene herein after referred to as “fork head domain protein” (or alternatively as FKHR) is well-known in the art. (For a non-limiting example, see GenBank Accession U02310, herein incorporated by reference.) As used herein, the term “fork head domain protein” (as well as FKHR) refers to a gene capable of transcribing an mRNA transcript having substantial homology with an mRNA transcribed from the gene for the fork head domain protein set forth in SEQ ID No:430. In a preferred embodiment an mRNA transcribed from said gene comprises an mRNA target region having substantial homology to an mRNA target region set forth in SEQ ID No: 266.

[0168] The gene herein after referred to as “HOXB7” is well-known in the art. (For a non-limiting example, see GenBank Accession AJ414528, herein incorporated by reference.) As used herein, the term “HOXB7” refers to a gene capable of transcribing an mRNA transcript having substantial homology with an mRNA transcribed from the gene for the HOXB7 gene set forth in SEQ ID No:431. In a preferred embodiment an mRNA transcribed from said gene comprises an mRNA target region having substantial homology to an mRNA target region set forth in SEQ ID No: 268.

[0169] The gene herein after referred to as “Pax-3” is well-known in the art. (For a non-limiting example, see GenBank Accession AJ007392, herein incorporated by reference.) As used herein, the term “Pax-3” refers to a gene capable of transcribing an mRNA transcript having substantial homology with an mRNA transcribed from the gene for the Pax-3 set forth in SEQ ID No:432. In a preferred embodiment an mRNA transcribed from said gene comprises an mRNA target region having substantial homology to an mRNA target region set forth in SEQ ID No: 269.

[0170] The gene herein after referred to as “homeobox protein SHOTa” (or alternatively as SHOTa) is well-known in the art. (For a non-limiting example, see GenBank Accession AJ002367, herein incorporated by reference.) As used herein, the term “homeobox protein SHOTa” (as well as SHOTa) refers to a gene capable of transcribing an mRNA transcript having substantial homology with an mRNA transcribed from the gene for the homeobox protein SHOTa set forth in SEQ ID No:433. In a preferred embodiment an mRNA transcribed from said gene comprises an mRNA target region having substantial homology to an mRNA target region set forth in SEQ ID No: 270.

[0171] The gene herein after referred to as “inhibitor of growth family member 1” (or alternatively as ING1) is well-known in the art. (For a non-limiting example, see GenBank Accession NM_{—}198219, herein incorporated by reference.) As used herein, the term “inhibitor of growth family member 1” (as well as ING1) refers to a gene capable of transcribing an mRNA transcript having substantial homology with an mRNA transcribed from the gene for the inhibitor of growth family member 1 set forth in SEQ ID No:434. In a preferred embodiment an mRNA transcribed from said gene comprises an mRNA target region having substantial homology to an mRNA target region set forth in SEQ ID No: 271.

[0172] The gene herein after referred to as “v-ets erythroblastosis virus E26 oncogene like” (or alternatively as V-ETS or ERG) is well-known in the art. (For a non-limiting example, see GenBank Accession NM_{—}004449, herein incorporated by reference.) As used herein, the term “v-ets erythroblastosis virus E26 oncogene like” (as well as V-ETS or ERG) refers to a gene capable of transcribing an mRNA transcript having substantial homology with an mRNA transcribed from the gene for the v-ets erythroblastosis virus E26 oncogene like set forth in SEQ ID No:435. In a preferred embodiment an m-RNA transcribed from said gene comprises an mRNA target region having substantial homology to an mRNA target region set forth in SEQ ID No: 272.

[0173] The gene herein after referred to as “reticulon 4′ (or alternatively as RTN4) is well-known in the art. (For a non-limiting example, see GenBank Accession NM_{—}020532, herein incorporated by reference.) As used herein, the term “reticulon 4” (as well as RTN4) refers to a gene capable of transcribing an mRNA transcript having substantial homology with an mRNA transcribed from the gene for the reticulon 4 set forth in SEQ ID No:436. In a preferred embodiment an mRNA transcribed from said gene comprises an miRNA target region having substantial homology to an miRNA target region set forth in SEQ ID No: 273.

[0174] The gene herein after referred to as “NOD2 protein” (or alternatively as NOD2) is well-known in the art. (For a non-limiting example, see GenBank Accession AF178930, herein incorporated by reference.) As used herein, the term LNOD2 protein” (as well as NOD2) refers to a gene capable of transcribing an mRNA transcript having substantial homology with an mRNA transcribed from the gene for the NOD2 protein set forth in SEQ ID No:437. In a preferred embodiment an mRNA transcribed from said gene comprises an mRNA target region having substantial homology to an mRNA target region set forth in SEQ ID No: 274.

[0175] The gene herein after referred to as “interleukin 6 receptor” (or alternatively as IL6R) is well-known in the art. (For a non-limiting example, see GenBank Accession NM_{—}000565, herein incorporated by reference.) As used herein, the term “interleukin 6 receptor” (as well as IL6R) refers to a gene capable of transcribing an mRNA transcript having substantial homology with an mRNA transcribed from the gene for the interleukin 6 receptor set forth in SEQ ID No:438. In a preferred embodiment an mRNA transcribed from said gene comprises an mRNA target region having substantial homology to an mRNA target region set forth in SEQ ID No: 275.

[0176] The gene herein after referred to as “PML-2 mRNA” (or alternatively as PML2) is well-known in the art. (For a non-limiting example, see GenBank Accession M79463, herein incorporated by reference.) As used herein, the term “PML-2 mRNA” (as well as PML2) refers to a gene capable of transcribing an mRNA transcript having substantial homology with an mRNA transcribed from the gene for the PML-2 mRNA set forth in SEQ ID No:439. In a preferred embodiment an mRNA transcribed from said gene comprises an mRNA target region having substantial homology to an miRNA target region set forth in SEQ ID No: 276.

[0177] The gene herein after referred to as “discs large homolog 1” (or alternatively as DLG1) is well-known in the art. (For a non-limiting example, see GenBank Accession NM_{—}004087, herein incorporated by reference.) As used herein, the term “discs large homolog 1” (as well as DLG1) refers to a gene capable of transcribing an mRNA transcript having substantial homology with an mRNA transcribed from the gene for the discs large homolog 1 set forth in SEQ ID No:440. In a preferred embodiment an mRNA transcribed from said gene comprises an mRNA target region having substantial homology to an mRNA target region set forth in SEQ ID No: 277.

[0178] The gene herein after referred to as “Yes-associated protein 1” (or alternatively as YAP1) is well-known in the art. (For a non-limiting example, see GenBank Accession NM_{—}006106, herein incorporated by reference.) As used herein, the term “Yes-associated protein 1” (as well as YAP1) refers to a gene capable of transcribing an mRNA transcript having substantial homology with an mRNA transcribed from the gene for the Yes-associated protein 1 set forth in SEQ ID No:441. In a preferred embodiment an mRNA transcribed from said gene comprises an mRNA target region having substantial homology to an mRNA target region set forth in SEQ ID No: 278.

[0179] The gene herein after referred to as “CD 14 antigen” (or alternatively as CD 14) is well-known in the art. (For a non-limiting example, see GenBank Accession NM_{—}000591, herein incorporated by reference.) As used herein, the term “CD14 antigen” (as well as CD 14) refers to a gene capable of transcribing an mRNA transcript having substantial homology with an mRNA transcribed from the gene for the CD14 antigen set forth in SEQ ID No:442. In a preferred embodiment an mRNA transcribed from said gene comprises an mRNA target region having substantial homology to an mRNA target region set forth in SEQ ID No: 279.

[0180] The gene herein after referred to as “negative differentiation regulator” (or alternatively as NDR) is well-known in the art. (For a non-limiting example, see GenBank Accession AY255672, herein incorporated by reference.) As used herein, the term “negative differentiation regulator” (as well as NDR) refers to a gene capable of transcribing an mRNA transcript having substantial homology with an mRNA transcribed from the gene for the negative differentiation regulator set forth in SEQ ID No:443. In a preferred embodiment an mRNA transcribed from said gene comprises an mRNA target region having substantial homology to an mRNA target region set forth in SEQ ID No: 280.

[0181] The gene herein after referred to as “CREB binding protein” (or alternatively as CBP or CREBBP) is well-known in the art. (For a non-limiting example, see GenBank Accession NM_{—}004380, herein incorporated by reference.) As used herein, the term “CREB binding protein” (as well as CBP or CREBBP) refers to a gene capable of transcribing an mRNA transcript having substantial homology with an mRNA transcribed from the gene for the CREB binding protein (Rubinstein-Taybi syndrome) set forth in SEQ ID No:444. In a preferred embodiment an mRNA transcribed from said gene comprises an mRNA target region having substantial homology to an mRNA target region set forth in SEQ ID No: 281.

[0182] The gene herein after referred to as “v-ski sarcoma viral oncogene homolog” (or alternatively as V-ski or SKI) is well-known in the art. (For a non-limiting example, see GenBank Accession N_{—}003036, herein incorporated by reference.) As used herein, the term “v-ski sarcoma viral oncogene homolog” (as well as V-ski or SKI) refers to a gene capable of transcribing an mRNA transcript having substantial homology with an mRNA transcribed from the gene for the v-ski sarcoma viral oncogene homolog set forth in SEQ ID No:445. In a preferred embodiment an mRNA transcribed from said gene comprises an mRNA target region having substantial homology to an mRNA target region set forth in SEQ ID No: 282.

[0183] The gene herein after referred to as “sidekick homolog 1” (or alternatively as SDK1) is well-known in the art. (For a non-limiting example, see GenBank Accession NM_{—}152744, herein incorporated by reference.) As used herein, the term “sidekick homolog 1” (as well as SDK1) refers to a gene capable of transcribing an mRNA transcript having substantial homology with an mRNA transcribed from the gene for the sidekick homolog 1 set forth in SEQ ID No:446. In a preferred embodiment an mRNA transcribed from said gene comprises an mRNA target region having substantial homology to an mRNA target region set forth in SEQ ID No: 283.

[0184] The gene herein after referred to as “bone morphogenetic protein receptor type II” (or alternatively as BMPR2) is well-known in the art. (For a non-limiting example, see GenBank Accession NM_{—}001204, herein incorporated by reference.) As used herein, the term “bone morphogenetic protein receptor type II” (as well as BMPR2) refers to a gene capable of transcribing an mRNA transcript having substantial homology with an mRNA transcribed from the gene for the bone morphogenetic protein receptor type II set forth in SEQ ID No:447. In a preferred embodiment an mRNA transcribed from said gene comprises an mRNA target region having substantial homology to an mRNA target region set forth in SEQ ID No: 284.

[0185] The gene herein after referred to as “programmed cell death 10” (or alternatively as PDCD10) is well-known in the art. (For a non-limiting example, see GenBank Accession NM_{—}007217, herein incorporated by reference.) As used herein, the term “programmed cell death 10” (as well as PDCD10) refers to a gene capable of transcribing an mRNA transcript having substantial homology with an mRNA transcribed from the gene for the programmed cell death 10 set forth in SEQ ID No:448. In a preferred embodiment an mRNA transcribed from said gene comprises an mRNA target region having substantial homology to an mRNA target region set forth in SEQ ID No: 285.

[0186] The gene herein after referred to as “cyclin H” (or alternatively as CDK7 or CCNH) is well-known in the art. (For a non-limiting example, see GenBank Accession NM_{—}001239, herein incorporated by reference.) As used herein, the term “cyclin H” (as well as CDK7 or CCNH refers to a gene capable of transcribing an mRNA transcript having substantial homology with an mRNA transcribed from the gene for the cyclin H set forth in SEQ ID No:449. In a preferred embodiment an mRNA transcribed from said gene comprises an mRNA target region having substantial homology to an mRNA target region set forth in SEQ ID No: 286.

[0187] The gene herein after referred to as “nuclear protein double minute 1” (or alternatively as MDM1) is well-known in the art. (For a non-limiting example, see GenBank Accession NM_{—}017440, herein incorporated by reference.) As used herein, the term “nuclear protein double minute 1” (as well as MDM1) refers to a gene capable of transcribing an mRNA transcript having substantial homology with an mRNA transcribed from the gene for the nuclear protein double minute 1 set forth in SEQ ID No:450. In a preferred embodiment an mRNA transcribed from said gene comprises an mRNA target region having substantial homology to an mRNA target region set forth in SEQ ID No: 287.

[0188] The gene herein after referred to as “BCL2/adenovirus E1B 19 kDa interacting protein 2” (or alternatively as BNIP2) is well-known in the art. (For a non-limiting example, see GenBank Accession NM_{—}004330, herein incorporated by reference.) As used herein, the term “BCL2/adenovirus EIB 19 kDa interacting protein 2” (as well as BNIP2) refers to a gene capable of transcribing an mRNA transcript having substantial homology with an mRNA transcribed from the gene for the BCL2/adenovirus E1B 19 kDa interacting protein 2 set forth in SEQ ID No:451. In a preferred embodiment an mRNA transcribed from said gene comprises an mRNA target region having substantial homology to an mRNA target region set forth in SEQ ID No: 288.

[0189] The gene herein after referred to as “karyopherin (importin) beta 2” (or alternatively as Importin beta2) is well-known in the art. (For a non-limiting example, see GenBank Accession BC040340, herein incorporated by reference.) As used herein, the term “karyopherin (importin) beta 2” (as well as Importin beta2) refers to a gene capable of transcribing an mRNA transcript having substantial homology with an mRNA transcribed from the gene for the karyopherin (importin) beta 2 set forth in SEQ ID No:452. In a preferred embodiment an mRNA transcribed from said gene comprises an mRNA target region having substantial homology to an mRNA target region set forth in SEQ ID No: 289.

[0190] The gene herein after referred to as “v-ros UR2 sarcoma virus oncogene homolog 1” (or alternatively as V-ros or ROS1) is well-known in the art. (For a non-limiting example, see GenBank Accession NM_{—}002944, herein incorporated by reference.) As used herein, the term “v-ros UR2 sarcoma virus oncogene homolog 1” (as well as V-ros or ROS1) refers to a gene capable of transcribing an mRNA transcript having substantial homology with an mRNA transcribed from the gene for the v-ros UR2 sarcoma virus oncogene homolog 1 set forth in SEQ ID No:453. In a preferred embodiment an mRNA transcribed from said gene comprises an mRNA target region having substantial homology to an mRNA target region set forth in SEQ ID No: 290.

[0191] As disclosed herein, 100% sequence identity between the RNA and the target gene is not required to practice the present invention. Indeed, among the example of the instant invention, mRNAs having identities sharing as littles as about 50% identity with a corresponding mRNA target region hve been found to effectively modulate expression of a target gene. Thus, RNAs of the invention have the advantage of being able to tolerate sequence variations that might be expected due to genetic mutation, strain polymorphism, or evolutionary divergence.

[0192] The present invention provides products and methods for modulating expression of a target gene in a cell. One such method comprises introducing into the cell a polynucleotide that forms a duplex region with an mRNA transcribed from said target gene, wherein the duplex region comprises a mammalian mRNA target region. Another such method comprises introducing into the cell an siRNA that forms a duplex region with an mRNA, or precursor thereof, wherein an mRNA transcribed from the target gene comprises a mRNA target region. In certain preferred embodiments, the methods further comprise measuring expression of the target gene. The method are particularly useful for modulating ontogenesis, function, differentiation and/or viability of a mammalian cell. As such, the invention also provides methods for controlling ontogenesis of mammal, function of mammalian cell, differentiation of mammalian cell or viability of mammalian cell in the post-transcriptional phase by introducing into the cell a miRNA or a siRNA silencing precursor to the miRNA.

[0193] In one embodiment, the invention provides a method for modulating expression of a target gene in a cell, the method comprising introducing into the cell a polynucleotide that forms a duplex region with an mRNA transcribed from said target gene, wherein said duplex region comprises a mammalian miRNA target region. In a preferred embodiment, the mRNA target region comprises a sequence having at least about 70% identity to a polynucleotide selected from SEQ ID Nos: 5-11, 13, and 121-290. In more preferred embodiments, the miRNA target region comprises a sequence having at least about 80% identity, at least about 90% identity, or at least about 95% identity to a polynucleotide selected from SEQ ID Nos: 5-11, 13, and 121-290. In certain preferred embodiments, the inventive methods employ an mRNA or a precursor thereof, or a vector encoding said mRNA or a precursor thereof for use as a polynucleotide to be introduced into the cell. In certain preferred embodiments, the cell is a mammalian cell, and preferably a human cell. The cell may be an isolated cell or may be part of a culture, tissue, or whole multi-cellular organism. In a preferred embodiment, the mRNA comprises a sequence having at least about 70% identity to a polynucleotide selected from SEQ ID Nos: 1, 3, 12, and 14-120. In more preferred embodiments, the mRNA comprises a sequence having at least about 80% identity, at least about 90% identity, or at least about 95% identity to a polynucleotide selected from selected from SEQ ID Nos: 1, 3, 12, and 14-120.

[0194] Particularly preferred embodiments of mRNAs for use in the inventive method include miR-1, miR-2-1, miR-5, miR-7, miR-8, miR-11, miR-12, miR-13, miR-14, miR-16, miR-16, miR-17, miR-18, miR-19, miR-20, miR-21, miR-22, miR-23, miR-24, miR-25, miR-26, miR-27, miR-28, miR-29, miR-30, miR-31, miR-32, miR-33, miR-34, miR-92, miR-93, miR-94, miR-95, miR-96, miR-97, miR-98, miR-99, miR-100, miR101, miR-103, miR-104, miR-105, miR-106, miR-107, miR-109, miR-110, miR-111, miR-112, miR-113, miR-114, miR-116, miR-119, miR-122, miR-125, miR-126, miR-127, miR-129, miR-130, miR-132, miR-133, miR-134, miR-136, miR-138, miR-140, miR-141, miR-144, miR-145, miR-146, miR-147, miR-148, miR-149, miR-150, miR-151, miR-153, miR-154, miR-157, miR-158, miR-160, miR-162, miR-164, miR-172, miR-173, miR-174, miR-175, miR-176, miR-177, miR-178, miR-179, miR-180, miR-182, miR-183, miR-184, miR-185, miR-186, miR-187, miR-188, miR-189, miR-191, miR-192, miR-193, miR-195, miR-196, miR-197, miR-199, miR-201, miR-203, miR-205, and miR-224, or a precursor thereof.

[0195] Preferred embodiments of the inventive methods include those for modulating expression of a target gene in a cell, wherein the target gene is one or more of dbl proto-oncogene; transforming growth factor beta 1; transforming growth factor alpha; v-myb myeloblastosis viral oncogene homolog; c-cbl proto-oncogene; snoI; activin beta E subunit; myogenic factor 5; fibroblast growth factor 9; RON encoding a tyrosine kinase; E3 ubiquitin ligase SMURF1; jagged 2; jun-B encoding the JUN-B protein; methyl-CpG binding domain protein 4; ZIP kinase; endomucin; ICE-protease activating factor; hairy and enhancer of split 1; transforming growth factor beta 3; enaptin mRNA; AMP deaminase; interleukin 1 alpha; E2F transcription factor 6; laminin alpha; polymerase (DNA-directed) alpha; leukocyte tyrosine kinase; homeo box D1; laminin gamma; tumor necrosis factor receptor superfamily member 1A; villin 2; frizzled homolog 5; ATP-dependent chromatin remodelling protein; MSX2 mRNA for transcription factor; adipose differentiation-related protein; myogenic factor 4; SRY (Sex determining Region Y)-box 5; Notch homolog 1; Human tyrosine kinase-type receptor; polymerase (DNA directed) theta; cAMP responsive element binding protein 3; timeless homolog; RAD52 homolog; toll-like receptor 4; SRY (Sex determining Region Y)-box 9; homeo box A5; cell division cycle 42 GTP binding protein; desmuslin; TFIIIC Box B-binding subunit; profilin 2; c-fms proto-oncogene; delta-like 1; fatty-acid-Coenzyme A ligase long-chain 5; discs large homolog-associated protein 2; TFIIH gene for transcription factor II H; RNA polymerase III subunit RPC; RecQ protein-like 5; METH2 protein; MOST2 protein; SRY (Sex determining Region Y)-box 7; integrin beta 1 subunit; desmin; protection of telomeres 1; H2.0-like homeo box 1; GABA transport protein; v-myc myelocytomatosis viral related oncogene neuroblastoma derived; BAG-family molecular chaperone regulator-S; Human placental bone morphogenic protein; retinoblastoma-associated factor 600; ALK-4; tolloid-like 2; RIGB; Human DNA repair helicase; T-box 22; BRCA1 associated protein 1; Sp3 transcription factor; TEF-1 gene; forkhead box A3; ets family transcription factor ELF2A; microtubule-associated protein 1A; myosin 5B; NEDD4-like ubiquitin ligase 1; Mint1 mRNA; PARX protein; epidermal growth factor receptor; matrix metalloproteinase 3; VE-cadherin; microtubule-associated protein 2; TAF7 RNA polymerase II TATA box binding protein (TBP)-associated factor; mitochondrial elongation factor G2; eyes absent homolog; paired box gene 3; synaptotagmin I; histone deacetylase 5; homolog of Drosophila headcase; homeo box B8; fyn-related kinase; TGF-beta/activin signal transducer FAST-1p; La autoantigen; mutL homolog 1; E74-like factor 3; B-myb gene; a-myb mRNA; jagged 1; homeobox protein SHOTb; death-associated protein kinase 3; RAD51 homolog (RecA homolog); methyl-CpG binding endonuclease; HUS1 checkpoint homolog; HES1 protein; caldesmon 1; VENT-like homeobox 2; early growth response 2 protein; Notch3; lin-28 homolog; PML-3; c-myc binding protein; transducer of ERBB2 1; neuron navigator 3; multiple asters 1; headcase homolog; microtubule-associated protein 6; methyl-CpG binding domain protein 1; EphA6; polymerase (RNA) II (cDNA directed); neuro-oncological ventral antigen 1; activating transcription factor 1; interphotoreceptor retinoid-binding protein; E2F transcription factor 3; mesoderm specific transcript homolog; bone morphogenetic protein 3; EphA3; methyl-CpG binding domain protein 5; fibroblast growth factor 12; RNA helicase A; matrix metalloproteinase 26; crossveinless-2; cadherin 5 type 2 VE-cadherin; eukaryotic translation initiation factor 4A; TWEAK; fork head domain protein; HOXB7 gene; Pax-3; homeobox protein SHOTa; inhibitor of growth family member 1; v-ets erythroblastosis virus E26 oncogene like; reticulon 4; NOD2 protein; interleukin 6 receptor; PML-2 mRNA; discs large homolog 1; Yes-associated protein 1; CD14 antigen; negative differentiation regulator; CREB binding protein; v-ski sarcoma viral oncogene homolog; sidekick homolog 1; bone morphogenetic protein receptor type II; programmed cell death 10; cyclin H; nuclear protein double minute 1; BCL2/adenovirus E1B 19 kDa interacting protein 2; karyopherin beta 2; and v-ros UR2 sarcoma virus oncogene homolog 1.

[0196] In a preferred embodiment, the gene target of the method comprises a polynucleotide sequence that hybridizes under moderately stringent conditions with a polynucleotide sequence selected from SEQ ID Nos: 291-454.

[0197] It is particularly preferred that the mRNA transcribed from said target gene comprises a polynucleotide sequence having at least 70% identity to a polynucleotide selected from SEQ ID Nos: 5-11, 13, and 121-290. However, the method contemplates mRNA molecules having mRNA target sequences other than those set forth in 5-11, 13, and 121-290.

[0198] In another inventive method for modulating expression of a mammalian target gene in a cell contemplated by the instant invention, an siRNA that forms a duplex region with an mRNA, or precursor thereof is introduced into a cell comprising an mRNA transcribed from a target gene, where the target gene comprises an mRNA target region. In preferred embodiments of the inventive method, the siRNA forms a duplex region with an mRNA. The resulting duplex may result in, for example, inhibiting the mRNA from forming a second duplex region with mRNA transcribed from said target gene. It is particularly preferred that the siRNA forms a duplex region with an mRNA precursor, thereby inhibiting the mRNA precursor from converting to mRNA.

[0199] In certain embodiments, the mRNA or precursor thereof comprises a sequence having at least about 70% identity to a polynucleotide selected from SEQ ID Nos: 1, 3, 12, and 14-120. Among the especially preferred embodiments are those in which wherein the mRNA target region of the method comprises a sequence having at least about 70% identity to a polynucleotide selected from SEQ ID Nos: 5-11, 13, and 121-290.

[0200] Contemplated methods include those in which the siRNA target is one or more of miR-1, miR-2-1, miR-5, miR-7, miR-8, miR-11, miR-12, miR-13, miR-14, miR-15, miR-16, miR-17, miR-18, miR-19, miR-20, miR-21, miR-22, miR-23, miR-24, miR-25, miR-26, miR-27, miR-28, miR-29, miR-30, miR-31, miR-32, miR-33, miR-34, miR-92, miR-93, miR-94, miR-95, miR-96, miR-97, miR-98, miR-99, miR-100, miR101, miR-103, miR-104, miR-105, miR-106, miR-107, miR-109, miR-110, miR-111, miR-112, miR-113, miR-114, miR-116, miR-119, miR-122, miR-125, miR-126, miR-127, miR-129, miR-130, miR-132, miR-133, miR-134, miR-136, miR-138, miR-140, miR-141, miR-144, miR-145, miR-146, miR-147, miR-148, miR-149, miR-150, miR-161, miR-163, miR-154, miR-157, miR-158, miR-160, miR-162, miR-164, miR-172, miR-173, miR-174, miR-175, miR-176, miR-177, miR-178, miR-179, miR-180, miR-182, miR-183, miR-184, miR-185, miR-186, miR-187, miR-188, miR-189, miR-191, miR-192, miR-193, miR-195, miR-196, miR-197, miR-199, miR-201, miR-203, miR-205, and miR-224, or a precursor thereof. mRNA or precursor thereof comprising a sequence selected from the group consisting of SEQ ID Nos: 1, 3, 12, and 14-120 is especially preferred.

[0201] In certain embodiments of the inventive methods employing an siRNA that forms a duplex region with an mRNA, or precursor thereof, a preferred target gene is includes one or more of: dbl proto-oncogene; transforming growth factor beta 1; transforming growth factor alpha; v-myb myeloblastosis viral oncogene homolog; c-cbl proto-oncogene; snoI; activin beta E subunit; myogenic factor 5; fibroblast growth factor 9; RON encoding a tyrosine kinase; E3 ubiquitin ligase SMURF1; jagged 2; jun-B encoding the JUN-B protein; methyl-CpG binding domain protein 4; ZIP kinase; endomucin; ICE-protease activating factor; hairy and enhancer of split 1; transforming growth factor beta 3; enaptin mRNA; AMP deaminase; interleukin 1 alpha; E2F transcription factor 6; laminin alpha; polymerase (DNA-directed) alpha; leukocyte tyrosine kinase; homeo box D1; laminin gamma; tumor necrosis factor receptor superfamily member 1A; villin 2; frizzled homolog 5; ATP-dependent chromatin remodelling protein; MSX2 mRNA for transcription factor; adipose differentiation-related protein; myogenic factor 4; SRY (Sex determining Region Y)-box 5; Notch homolog 1; Human tyrosine kinase-type receptor; polymerase (DNA directed) theta; cAMP responsive element binding protein 3; timeless homolog; RAD52 homolog; toll-like receptor 4; SRY (Sex determining Region Y)-box 9; homeo box As; cell division cycle 42 GTP binding protein; desmuslin; TFIIIC Box B-binding subunit; profilin 2; c-fms proto-oncogene; delta-like 1; fatty-acid-Coenzyme A ligase long-chain 5; discs large homolog-associated protein 2; TFIIH gene for transcription factor II H; RNA polymerase III subunit RPC; RecQ protein-like 5; METH2 protein; MOST2 protein; SRY (Sex determining Region Y)-box 7; integrin beta 1 subunit; desmin; protection of telomeres 1; H2.0-like homeo box 1; GABA transport protein; v-myc myelocytomatosis viral related oncogene neuroblastoma derived; BAG-family molecular chaperone regulator-S; Human placental bone morphogenic protein; retinoblastoma-associated factor 600; ALK-4; tolloid-like 2; RIGB; Human DNA repair helicase; T-box 22; BRCA1 associated protein 1; Sp3 transcription factor; TEF-1 gene; forkhead box A3; ets family transcription factor ELF2A; microtubule-associated protein 1A; myosin 5B; NEDD4-like ubiquitin ligase 1; Mint1 mRNA; PARX protein; epidermal growth factor receptor; matrix metalloproteinase 3; VE-cadherin; microtubule-associated protein 2; TAF7 RNApolymerase II TATA box binding protein (TBP)-associated factor; mitochondrial elongation factor G2; eyes absent homolog; paired box gene 3; synaptotagmin I; histone deacetylase 5; homolog of Drosophila headcase; homeo box B8; fyn-related kinase; TGF-beta/activin signal transducer FAST-1p; La autoantigen; mutL homolog 1; E74-like factor 3; B-myb gene; a-myb mRNA; jagged 1; homeobox protein SHOTb; death-associated protein kinase 3; RAD51 homolog (RecA homolog); methyl-CpG binding endonuclease; HUS1 checkpoint homolog; HES1 protein; caldesmon 1; VENT-like homeobox 2; early growth response 2 protein; Notch3; lin-28 homolog; PML-3; c-myc binding protein; transducer of ERBB2 1; neuron navigator 3; multiple asters 1; headcase homolog; microtubule-associated protein 6; methyl-CpG binding domain protein 1; EphA5; polymerase (RNA) III (DNA directed); neuro-oncological ventral antigen 1; activating transcription factor 1; interphotoreceptor retinoid-binding-protein; E2F transcription factor 3; mesoderm specific transcript homolog; bone morphogenetic protein 3; EphA3; methyl-CpG binding domain protein 5; fibroblast growth factor 12; RNA helicase A; matrix metalloproteinase 26; crossveinless-2; cadherin 5 type 2 VE-cadherin; eukaryotic translation initiation factor 4A TWEAK; fork head domain protein; HOXB7 gene; Pax-3; homeobox protein SHOTa; inhibitor of growth family member 1; v-ets erythroblastosis virus E26 oncogene like; reticulon 4; NOD2 protein; interleukin 6 receptor; PML-2 mRNA; discs large homolog 1; Yes-associated protein 1; CD14 antigen; negative differentiation regulator; CREB binding protein; v-ski sarcoma viral oncogene homolog; sidekick homolog 1; bone morphogenetic protein receptor type II; programmed cell death 10; cyclin H; nuclear protein double minute 1; BCL2/adenovirus E1B 19 kDa interacting protein 2; karyopherin beta 2; and v-roe UR2 sarcoma virus oncogene homolog 1.

[0202] Preferred embodiments include those in which the target gene comprises a polynucleotide sequence that hybridizes under moderately stringent conditions with a polynucleotide sequence selected from SEQ ID Nos: 291-454. It is especially preferred that the mRNA transcribed from the target gene comprises a polynucleotide sequence having at least about 70% identity to a polynucleotide selected from SEQ ID Nos: 1, 3, 12, and 14-120.

[0203] The methods of the invention may additionally comprise measuring expression of said target gene.

[0204] As one of skill in the art would recognize, the inventive methods of the application may be employed to accomplish a variety of objectives. For example, the methods may be used to modulate ontogenesis, function, differentiation and/or viability of a mammalian cell. As such, the invention contemplates methods for controlling ontogenesis of mammal, function of mammalian cell, differentiation of mammalian cell or viability of mammalian cell in the post-transcriptional phase, the methods comprising introducing into the cell a mRNA or an siRNA silencing precursor to an endogenous or heterologous mRNA. By way of example, methods of the instant invention may be employed to control differentiation of nerve cell by regulating expression of hairy and enhancer of split 1.

[0205] Where an siRNA is introduced into the cell, one preferred embodiment contemplates the siRNA binding to a loop in stem-loop structure of an mRNA or precursor thereof. In such methods, it is preferred that siRNA has a sequence with at least about 70% identity to the sequence disclosed in SEQ ID No: 2. However, siRNAs prepared to to target other mRNA are also contemplated. Contemplated targets include, for example, miR-1, miR-2-1, miR-5, miR-7, miR-8, miR-11, miR-12, miR-13, miR-14, miR-15, miR-16, miR-17, miR-18, miR-19, miR-20, miR-21, miR-22, miR-23, miR-24, miR-25, miR-26, miR-27, miR-28, miR-29, miR-30, miR-31, miR-32, miR-33, miR-34, miR-92, miR-93, miR-94, miR-95, miR-96, miR-97, miR-98, miR-99, miR-100, miR101, miR-103, miR-104, miR-105, miR-106, miR-107, miR-109, miR-110, miR-111, miR-112, miR-113, miR-114, miR-116, miR-119, miR-122, miR-125, miR-126, miR-127, miR-129, miR-130, miR-132, miR 133, miR-134, miR-136, miR-138, miR-140, miR-141, miR-144, miR-145, miR-146, miR-147, miR-148, miR-149, miR-150, miR-151, miR-153, miR-154, miR-157, miR-158, miR-160, miR-162, miR-164, miR-172, miR-173, miR-174, miR-175, miR-176, miR-177, miR-178, miR-179, miR-180, miR-182, miR-183, miR-184, miR-185, miR-186, miR-187, miR-188, miR-189, miR-191, miR-192, miR-193, miR-195, miR-196, miR-197, miR-199, miR-201, miR-203, miR-205, and miR-224, and precursors thereof. Furthermore, it is preferred that siRNA has a sequence with at least about have substantial homology with a contemplated target sequence found in an mRNA or precursor thereof.

[0206] The invention further contemplates plasmid vectors comprising a promoter and a polynucleotide sequence expressing mRNA or a precursor to the mRNA. Also contemplated are plasmid vectors comprising a promoter and a nucleotide sequence expressing siRNA silencing precursor to mRNA. With respect to vectors encoding siRNA, it is especially preferred that such vectors encode mRNA that is capable of forming a duplex region with an mRNA transcribed from a mammalian target gene. Promoters selected from the group consisting of tRNA^{(val)} promoter, U6 promoter, H1 promoter and Pol II promoter, such as CMV and SV40, are especially preferred.

[0207] The invention contemplates methods employing the use of the contemplated vectors for controlling ontogenesis of mammal, function of mammalian cell, differentiation of mammalian cell or viability of mammalian, the methods comprising introducing into the cell a contemplated plasmid vector.

[0208] Furthermore, the invention contemplates methods for treating cancer, immune disease, nerve disorder or inflammatory disease, the methods comprising introducing into a cell an mRNA, a siRNA silencing precursor to the mRNA or the plasmid vector as described herein. A particularly preferred method comprises treating a nerve disorder selected from amyotrophic lateral sclerosis (ALS), Parkinson disease or Alzheimer disease.

[0209] The invention provides for methods useful in screening pharmaceuticals using an mRNA, an siRNA silencing precursor to the mRNA or the plasmid vector defined, the methods employing the vectors as described herein. It is particularly preferred that the target mRNA is derived from a recombinant gene having a sequence of the target region of the mRNA.

[0210] Especially preferred methods are those for gene function analysis using a mRNA, a siRNA silencing precursor to the mRNA or the plasmid vector defined as described herein. Other preferred methods include those for regulation of cell differentiation to muscle cell, bone cell or myocardial cell, where the gene to be regulated is a gene whose function is identified by the gene function analysis as described herein. Also contemplated are methods for preservation or maintenance of anaplastic cell, introducing into cell a substance suppressing expression of miR-23; methods for regulating ratio of gene expression, by producing recombinant of selected gene and target sequence of miR-23 of Hes1, and designing miR-23 sequence 50 to 90% complementary to the target sequence; methods for suppressing gene expression, the method comprising introducing into cell an siRNA inducing decomposition of mRNA and a mRNA, such as, for example, miR-23.

### EXAMPLES

[0211] The invention is further described by example. The examples, however, are provided for purposes of illustration to those skilled in the art, and are not intended to be limiting. Moreover, the examples are not to be construed as limiting the scope of the appended claims. Thus, the invention should in no way be construed as being limited to the following examples, but rather, should be construed to encompass any and all variations that become evident as a result of the teaching provided herein.

Hea1 is a Target of miR-23 in NT2 Cells

[0212] It has been reported that some of the Drosophila mRNAs that align to the K box motif (5′-UGUGAU-3′) mediate a negative post-transcriptional regulation of the Hairy/enhancer of split (HEEL gene family in Drosophila2830. A human miR-23 containing the antisense sequence to the K box motif has also been identified, although its target gene is unknown.

[0213] We initiated a study to investigate whether the human Hairy HES gene was the target of human miR-23. Hairy HES1 (Accession No. NM_{—}005524)³¹ is a basic helix-loop-helix (bHLM transcriptional repressor that is expressed in undifferentiated cells but not in differentiated cells³²⁻³⁴. It participates in the Notch signaling pathway in mammals and acts as an anti-differentiation factor. miR-23 aligned to a coding region of human HES1 (NM_{—}005524) mRNA near the termination codon and to mouse Hes1 mRNA (NM-008235) at nearly the same position as in human HES1 including the stop codon (FIG. 1a). A duplex of HES1 (NM_{—}005524) mRNA and miR-23 was also observed using a prediction program for mRNA secondary structure (Mulfold) suggesting that miR-23 may be conserved phylogenetically as a regulator of human and mouse Hes1. In addition, we also showed that miR-23 forms partial base-pairing with another mRNA similarly called HES1 Y07572 (human homolog of Escherichia coli and Zebrafish, Accession No. Y07572)₃₅ at nearly the same position as in human HES1 (NM_{—}005524) and mouse HES1 (NM_{—}008235) including the stop codon. A protein related to HES1 Y07572 with the same ElbB domain is involved in an early stage of the biosynthesis of isoprenoid compounds. Although Hairy HES1 (NM_{—}005524) has no similarity to Homolog HES1 Y07572) at the amino acid level, the target sequences for miR-23 in both genes have 70% similarity at the mRNA level). In addition, we found two other independent target sites of miR-23 in the 3′-untranslated region (UTR) of Hairy HES1 (NM_{—}005524) mRNA, which are designated motifs II and III (FIG. 1b). Moreover, we considered phylogenetic conservation between human and mouse Hairy Hes1 as a target of miR-23. The target of mouse Hairy Hes1 mRNA (nearly the same position as human Hes1 including the stop codon) exhibited significant complementarity (74%) to mouse miR-23b (FIG. 1a). A duplex of Hairy Hes1 and miR23 was observed using a prediction program of mRNA secondary structure (Mulfold). Thus, this observation suggests that the function of miR-23 is phylogenetically conserved as a regulator of human and mouse Hairy Hes1.

[0214] To confirm whether Hairy HES1 mRNA might be a target of miR-23, we used human NT2 cells, which are human embryonal carcinoma (EC) cells and differentiate into neural cells upon treatment with retinoic acid (RA)₃₆. We first examined the expression of Hairy HES1 during RA-induced differentiation by Western blotting and amplified ELISA assay. NT2 cells were treated with RA (5 μM) for 3 weeks. As shown in FIG. 1c, Hairy HES1 was easily detectable in undifferentiated NT2 cells. By contrast, Hairy HES1 was barely detectable in differentiated NT2 cells. However, as indicated by Northern blotting analysis, the level of Hairy HES1 mRNA in both nuclear (N) and cytoplasmic (C) fraction of cells remained unchanged during RA-induced differentiation (FIG. 1d). Moreover, in a sucrose sedimentation assay, an association between Hairy HES1 mRNA and polyribosomes was detected in both undifferentiated and differentiated NT2 cells (data not shown). Similar observations have been reported in the case of lin-4:lin-14 in C. elegans^{19,20}. These results suggest that the expression of Hairy HES1 might be regulated not at the cytoplasmic transport of Hairy HES1 mRNA but at the translation level during differentiation of NT2 cells. Next we examined the level of miR-23 during RA-induced differentiation by Northern blotting analysis. As shown in FIG. 1e, miR-23 was barely detectable in undifferentiated NT2 cells but was easily detected in differentiated NT2 cells. These results suggest that expression of miR-23 might be related to differentiation of NT2 cells.

Regulation of Expression of Hairy HES1 Gene by miR-23

[0215] Next, to examine whether expression of the gene for Hes1 is regulated by miR-23, we introduced synthetic single stranded miR-23 or double stranded miR-23 (FIG. 2c) into undifferentiated NT2 cells. When synthetic miR-23 was introduced at 100 nM into undifferentiated NT2 cells, the intracellular level of Hes1 fell significantly (FIG. 2d). In addition, double stranded miR-23 has high efficiency compared with single stranded miR-23 in mammalian cells (FIG. 2c). By contrast, in the presence of synthetic mutant miR-23, the level of Hes1 in undifferentiated NT2 cells remained unchanged and similar to that in untreated wild-type (WT) NT2 cells (FIG. 2b). In addition, the level of Hes1 mRNA remained constant irrespective of the presence or absence of either synthetic miR-23 or mutant miR-23 (FIG. 2d). Similar results were obtained using pol III promoter (U6 and tRNA promoter)-dependent mRNA expression system (Fig. b). These results further suggest that synthetic miR-23 might suppress the expression of the gene for Hes1 at the translational level.

[0216] To examine the function of miR-23 in further detail, we tried to reduce the level of endogenous miR-23 using synthetic siRNA (siRNA-miR-23) targeted to a loop region of the precursor to miR-23 (FIG. 2e). siRNAs can induce the RNA interference-mediated (RNAi-mediated) sequence-specific silencing of gene expression in mammalian cells^{87,88}. RNAi refers to the sequence-specific silencing of gene expression that is induced by double-stranded RNAs (dsRNAs) in animals and plants^{89,40}. When 100 nM synthetic siRNA-miR-23 was introduced into differentiated NT2 cells, the intracellular level of precursor and mature miR-23 fell significantly (FIG. 20. By contrast, the level of Hes1 protein increased in the presence of siRNA-miR-23 (FIG. 2g). Importantly, mutant siRNA-miR-23 (FIG. 2e) did not affect expression of miR-23 or the level of Hes1 in NT2 cells. Moreover, the level of Hes1 mRNA was unaffected by synthetic siRNA-miR-23 (FIG. 2h). Similar results were obtained using pol m promoter (U6 and tRNA promoter)-dependent siRNA expression system that targeted to mRNAs (FIGS. 2f and 2g). These results indicate that the synthetic siRNA-miR-23 interfered with the function of miR-23 and, as a result, it promoted the accumulation of Hes1 protein. These results strengthen our hypothesis that miR23 regulates the expression of Hes1 at the post-transcriptional level.

Target Specificity of miR-23 in NT2 Cells

[0217] We thus examined whether the intact Hairy HES1 (NM-005524) 3′-UTR can confer regulation on a reporter gene in response to endogenous miR-23 in NT2 cells. To examine the target specificity of miR-23, we constructed plasmids for expression of a chimeric gene for luciferase that was fused 3′-UTR including the sequence of the three potential target motifs of miR-23 in Hairy HES1 mRNA (Luc-TM23; FIG. 3a). As a control, we designed the chimeric gene for luciferase that included the sequence of the mutated target motif(s) of miR-23 in Hairy HES1 mRNA (Luc-mutant TM23, Luc-mutant motif I, Luc-mutant motif II and Luc-mutant motif III; FIG. 3a). Then we transiently introduced each plasmid into NT2 cells. After incubation for 72 h, cells were harvested and lysed. Total proteins were used for the assays of luciferase activity using a luminometer (Lumat LB9501; Berthold, Bad Wildbad, Germany). As shown in FIG. 3b, we detected luciferase activity in undifferentiated NT2 cells (—RA) that expressed the gene for Luc-TM23. By contrast, the luciferase activity in differentiated cells (+RA) that expressed the gene for Luc-TM23 was significantly lower than that in undifferentiated cells (FIG. 3b). The luciferase activity in cells that expressed Luc-mutant TM23 did not changed during the differentiation. These results, under the conditions of natural endogenous level of miR-23, are in accord with the results with Hes 1. In addition, disruption of one target motif of miR-23 weakened the reduction level of the luciferase activity, suggesting the synergistic interaction of miR-23 with these three target sites.

[0218] Additionally, the luciferase activity of Luc-TM23 in undifferentiated NT2 cells that had been treated with synthetic miR-23 was significantly lower than that in untreated WT NT2 cells (rig. 3c). Mutant miR-23 did not affect the luciferase activity of the natural TM23-containing (the intact Hairy HES1 3′-UTR-containing) Luc-TM23 cells. By contrast, the luciferase activity in cells that expressed Luc-mutant TM23 remained the same in the presence or absence of synthetic miR-23 and in the presence of mutant miR-23. In addition, in the presence of synthetic miR-23, the luciferase activity in cells that expressed luciferase gene that has one mutant target motif of miR-23 was partially reduced.

[0219] Moreover, the luciferase activity in differentiated NT2 cells that had been treated with synthetic siRNA-miR-23 was higher than that in WT differentiated NT2 cells (FIG. 3d). These results suggest that the regulation of translation by the physiological level of miR-23 can be monitored by the attachment of its natural target UTR to the gene for luciferase and demonstrated that three independent target motifs in Hairy HES1 mRNA are certainly targets of miR-23.

[0220] Next, to examine the target specificity of miR-23, we constructed plasmids for expression of a chimeric gene for luciferase that was fused 3′-UTR sequence including the target sequence of miR-23 in Homolog HES1 mRNA (Luc-TS23; FIG. 3e). As a control we designed the chimeric gene for luciferase that was fused 3′-UTR sequence including the mutated target site of miR-23 in HES1 mRNA (Luc-mTS23; FIG. 3e). Then we introduced each plasmid into NT2 cells and obtained stable cell lines after selection with puromycin. As shown in FIG. 3b, we detected luciferase activity in undifferentiated NT2 cells that expressed the gene for Luc-TS23. By contrast, the luciferase activity in differentiated cells that expressed the gene for Luc-TS23 was lower than that in undifferentiated cells (FIG. 31). Additionally, the luciferase activity of Luc-TS23 in undifferentiated NT2 cells that had been treated with synthetic miR-23 was lower than that in untreated WT NT2 cells (FIG. 3g). Mutant miR-23 did not affect the luciferase activity of natural TS23-containing Luc-TS23 cells. To our surprise, a single-stranded mutant miR-23 RNA with appropriate compensatory mutations that restores its pairing to the mTS23 site (but retains the sites of mismatch, as shown at the mutant miR-23 region in FIG. 3h) rescued translational control of the mTS-luciferase (FIG. 3g), suggesting the possibility to create artificial microRNAs with slightly altered target sequences in the regulation of an arbitrarily chosen target gene. Moreover, the luciferase activity in differentiated NT2 cells that had been treated with synthetic siRNA-miR-23 was higher than that in WT differentiated NT2 cells (FIG. 3h). These results suggest that three TM23-I, -II and -III in Hairy HES1 (NM_{—}005524) mRNA and TS23 in Homolog HES1 (Y07572) mRNA are a target of miR-23 and that the natural near complementarity of TS23 to miR-23 is necessary for miR-23-mediated post-transcriptional silencing of gene expression.

The Role of miR-23 During RA-Induced Neuronal Differentiation

[0221] To examine the role of miR-23 during RA-induced neuronal differentiation of NT2 cells, we examined a phenotype of NT2 cells grown in the presence or absence of synthetic siRNA-miR-23 by immiuno-staining with SSEA-3- and MAP2-specific antibodies. SSEA-3 is expressed only in undifferentiated NT2 cells and MAP2 is expressed only in differentiated NT2 cells^{41,42}. Wild-type NT2 cells differentiate into neural cells upon treatment with RA (FIG. 4a; left panel). However, in the presence of siRNA-miR-23, NT2 cells did not differentiate into the neural cells after treatment with RA (FIG. 4a; middle panel). In addition, the level of MAP2, a differentiation marker, did not increase after the cells were treated with synthetic siRNA-miR-23, even though the level of MAP2 increased in WT differentiated NT2 cells (FIG. 4b). Accordingly, the level of SSEA-3, a marker of undifferentiated cells, did not decrease when NT2 cells were treated with synthetic siRNA-miR-23 and RA (FIG. 4c). However, the addition of synthetic miR-23 to cells that contained siRNA-miR-23 was able to reverse the effects of siRNA-miR-23, and these cells differentiated into neural cells upon treatment with RA (FIG. 4a; right panel), with an accompanying reduction in the level of SSEA-3 and induction of MAP2 expression. These results suggest that miR-23 plays a critical role during RA-induced neuronal differentiation.

Identification of Target Genes of Other mRNAs in Mammalian Cells

[0222] To understand function of mRNA in mammalian cell, we identified target genes of other mRNAs (more than 100 mRNAs) using BLAST search program (Table 1). Many differentiation (myeloid, myogenic, osteogenic and adipogenic)-associated factors are involved in these target genes. For example, expression of HOXB8 that is target of miR-196 is regulated in myeloid differentiation of HL60 cells. In addition, Myf-5 (target of miR-13) and Myf-4 (target of miR-97) are participate in myogenic differentiation. Moreover, TGF-beta (target of miR-13) and BMP3 (target of miR-154) associate with an osteogenic differentiation. Expression of these identified target genes were significantly reduced by synthetic and vector based mRNAs (FIG. 5). Since mRNA and siRNA (target to mRNAs) expression vector can regulate expression of above mRNAs, these expression vector have a high potential for regulation of differentiation and development of mammalian cells.

Culture and Transfection of Cells

[0223] Human NT2 cells were cultured in Dulbecco's modified Eagle's medium (DMEA) supplemented with 10% fetal bovine serum (FBS). Transfections were performed with the Effectin™ reagent (QIAGEN, Hilden, Germany) according to the manufacturer's protocol. Luc-TS23-expressing and Luc-mTS23-expressing NT2 cells were selected by incubation with puromycin for a week. Retinoic acid was used at 5 μM to be induced neuronal differentiation of NT2 cells for 3 weeks.

Preparation of mRNAs and siRNAs

[0224] Synthetic miR-23, mutant miR-23 and siRNAs directed against miR-23 were synthesized with a DNA/RNA synthesizer (model 394; PE Applied Biosystems, CA, USA). For generation of siRNAs, synthetic RNAs were annealed by a standard method³⁷. These siRNAs (100 nM) and synthetic miR-23 (2 μM were then introduced into NT2 cells using Oligofectamin™ (Invitrogen, Calif., USA) according to the manufacture's protocol.

Construction of Plasmids

[0225] For construction of the Luc-TS23 and Luc-mTS23 expression plasmids, we used the plasmid PRL-TK (Promega, Wis., USA). Five copies of the target site or of the mutant target site of miR-23 were inserted downstream of the gene for luciferase in pRL-TK. In the case of luciferase reporter genes bearing only one copy of the miR-23 target site, miR-23 barely affected translation of Luc-TS23, probably because of the strong SV40 promoter compared with the natural Hes1 promoter. The nucleotide sequence of each chimeric gene was confirmed by direct sequencing.

Preparation of the Nuclear Fraction and the Cytoplasmic Fraction of Cells

[0226] For the preparation of the cytoplasmic fraction, NT2 cells were washed twice with PBS and then resuspended in digitonin lysis buffer (50 mM HEPES/KOH, pH 7.5, 50 mM potassium acetate, 8 mM MgCl2, 2 mM EGTA and 50 μg/mL digitonin) on ice for 10 mins. The lysate was centrifuged at 1,000×g and the supernatant was collected as the cytoplasmic fraction. The pellets were resuspended in NP-40 lysis buffer (20 mM Tris-HCl, pH 7.5, 50 mM KCl, 10 mM NaCl, 1 mM EDTA and 0.5% NP-40) and held on ice for 10 mins and the resultant lysate was used as the nuclear fraction.

Northern Blotting Analysis

[0227] Cytoplasmic RNA and nuclear RNA were extracted and purified from the cytoplasmic fraction and the nuclear fraction, respectively, with ISOGEN™ reagent (Wako Co., Thyama, Japan). Thirty micrograms of total RNA per lane were loaded on a polyacrylamide gel (for detection of miR-23) or agarose gel (for detection of Hes1 mRNA). After electrophoresis, bands of RNA were transferred to a nylon membrane (Amersham Co., Buckinghamshire, UK). The synthetic DNA probe for Hes1 and synthetic RNA probe for miR-23 were labeled with ³²P by T4 polynucleotide kinase (Takara Shuzo Co., Kyoto, Japan). The level of actin was measured as an endogenous control.

Amplified Sandwich Enzyme-Linked Immunosorbent Assay (ELISA).

[0228] Amplified ELISA has been described elsewhere⁴⁵. NT2 cells, grown in the presence or absence of RA (5 μM, for 3 weeks), were harvested. Total protein was used in this assay. ELISA plates were coated with specific polyclonal antibodies against Hes1 (gift from Dr. Sudo at TORAY Co.), SSEA-3 (Santa Cruz) or MAP2 (UBI, VA, USA). After the plates had been washed three times, biotinylated second antibodies, followed by horseradish peroxidase-conjugated (HRP-conjugated) streptavidin, were added at room temperature. Absorbance was monitored at 490 nm with a microplate reader after addition of phenylenediamine (Sigma-Aldrich Co., MO, USA).

Western Blotting Analysis

[0229] Total proteins (each 20 μg) were resolved by SDS-PAGE (10% polyacrylamide gel) and transferred to a polyvinylene difluoride (PVDF) membrane (Funakoshi Co., Tokyo, Japan) by electroblotting. Immune complexes were visualized with ECL kit (Amersham Co., Buckinghamshire, UK) using specific polyclonal antibodies against HES1 (gift from Dr. Sudo at TORAY Co.). The relative levels of HES1 was normalized with the level of actin.

Assay of Luciferase Activity.

[0230] miR-23-siRNAs, synthetic miR-23 and mutant miR-23 were introduced into NT2 cells that expressed Luc-TS23 or Luc-mTS23 using Oligofectamin™ (Invitrogen) according to the manufacture protocol. After incubation for 72 h, cells were harvested and lysed. Total protein was assayed for luciferase activity using a luminometer (Lumat LB9501; Berthold, Bad Wildbad, Germany).

Immunostaining

[0231] Cells were fixed in paraformaldehyde in PBS for 1 h. Then cells were incubated with polyclonal antibody against a SBEA-3 (Santa Cruz) or against MAP2 (UBI) for 2 h. Fluoresceinisothiocyanate-conjugated (FITC-conjugated) or rhodamine-conjugated secondary antibodies were then added. Nuclei of NT2 cells were stained with 4-diamidino-2-phenylindole (DAPI; Sigma-Aldrich Co.).

### REFERENCES

[0232] All references (e.g., books, articles, applications, and patents) cited in this specification are indicative of the level of skill in the art and their disclosures are incorporated herein in their entirety.
[0233] 1. Eddy, S. R. Non-coding RNA genes and the modern RNA world. Nature Reviews Genetics 2, 919-929 (2001).
[0234] 2. Lee, R. C., Feinbaum, R. L., & Ambros, V. The C. elegans heterochronic gene lin-4 encodes small RNAs with antisense complementarity to lin-14. Cell 75, 843-854 (1993).
[0235] 3. Reinhart, B. J., Slack, F. J., Basson, M., Pasquinelli, A. E., Bettinger, J. C., Rougvie, A. E., Horvitz, H. R., & Ruvkun, G. The 21-nucleotide let-7 RNA regulates developmental timing in C. elegans. Nature 403, 901-906 (2000).
[0236] 4. Pasquinelli, A. E., Reinhart, B. J., Slack, F., Martindale, M. Q., Kuroda, M. I., Maller, B., Hayward, D. C., Ball, E. E., Degnan, B., Muller, P., Spring, J., Srinivasan, A., Fishman, M., Finnerty, J., Corbo, J., Levine, M., Leahy, P., Davidson, E., & Ruvkun, G. Conservation of the sequence and temporal expression of let-7 heterochronic regulatory RNA. Nature 408, 86-89 (2000).
[0237] 5. Slack, F. J., Basson, M., Liu, Z., Ambros, V., Horvitz, H. R., & Ruvkun, G. The lin-41 RBCC gene acts in the C. elegans heterochronic pathway between the let-7 regulatory RNA end the LIN-29 transcription factor. Mol. Cell 5, 659-669 (2000).
[0238] 6. Lau, N. C., Lim, L. P., Weinstein, E. G., & Bartel, D. P. An abundant class of tiny RNAs with probable regulatory roles in C. elegans. Science, 294, 858-862 (2001).
[0239] 7. Lee, R. C., & Ambros, V. An extensive class of small RNAs in Caenorhabditis elegans. Science, 294, 862-864 (2001).
[0240] 8. Lagos-Quintana, M, Rauhut, R, Yalcin, A., Meyer, J., Lendeckel, W., & Tuschl, T. Identification of novel genes coding for small expressed RNAs. Science 294, 853-858 (2001).
[0241] 9. Mourelatos, Z., Dostie, J., Paushiin, S., Sharma, A., Charroux, B., Abel, L., Rappsilber, J., Mann, M., & Dreyfuss, G. miRNPs: a novel class of ribonucleoproteins containing numerous microRNAs. Genes Dev. 16, 720-728 (2002).
[0242] 10. Reinhart, B. J., Weinstein, E. G., Rhoades, M. W., Bartel, B., & Bartel, D. P. MicroRNAs in plants. Genes Dev. 16, 1616-1626 (2002).
[0243] 11. Lagos-Quintana, M., Rauhut, R., Yalcin, A., Meyer, J., Lendeckel, W., & Tuschl, T. Identification of tissue-specific microRNAs from mouse. Curr. Biol. 12, 735-739 (2002).
[0244] 12. Rhoades, M. W., Reinhart, B. J., Lim, L. P., Burge, C. B., Bartel, B., & Bartel, D. P. Prediction of plant microRNA targets. Cell 110, 513-520 (2002).
[0245] 13. Lagos-Quintana, M., Rauhut, R., Meyer, J., Borkhardt, A., & Tuschl, T. New microRNAs from mouse and human. RNA 9, 175-179 (2003).
[0246] 14. Lim, L. P., Glasner, M. E., Yekta, S., Burge, C. B., & Bartel, D. P. Vertebrate microRNA genes. Science 299, 1540 (2003).
[0247] 15. Lim, L. P., Lau, N. C., Weinstein, E. G., Abdelhakim, A., Yekta, S., Rhoades, M. W., Burge, C. B., & Bartel, D. P. The microRNAs of Caenorhabditis elegans. Genes Dev 17, 991-1008 (2003).
[0248] 16. Dostie, J., Mourelatos, Z., Yang, M., Sharma, A., & Dreyfuss, G. Numerous microRNPs in neuronal cells containing novel microRNAs. RNA 9, 180-186 (2003).
[0249] 17. Llave, C., Xie, Z., Kasschau, K. D., & Carrington, J. C. Cleavage of Scarecrow-like mRNA targets directed by a class of Arabidopsis mRNA. Science 297, 2053-2056 (2002).
[0250] 18. Tang, G., Reinhart, B. J., Bartel, D. P., & Zamore, P. D. A biochemical framework for RNA silencing in plants. Genes Dev. 17, 49-63 (2003).
[0251] 19. Olsen, P. H., & Ambros, V. The lin-4 regulatory RNA controls developmental timing in Caenorhabditis elegans by blocking LIN-14 protein synthesis after the initiation of translation. Dev. Biol. 216, 671-680 (1999).
[0252] 20. Seggerson, K., Tang, L., & Moss, E. G. Two genetic circuits repress the Caenorhabditis elegans heterochronic gene lin-28 after translation initiation. Dev Biol. 243, 215-225 (2002).
[0253] 21. Lee, Y, Jeon, K, Lee, J. T., Kim, S., & Kim, V. N. MicroRNA maturation: stepwise processing and subcellular localization. EMBO J. 21, 4663-4670 (2002).
[0254] 22. Grishok, A., Pasquinelli, A. E., Conte, D., Li, N., Parrish, S., Ha, I., Baillie, D. L., Fire, A., Ruvkun, G., & Mello, C. C. Genes and mechanisms related to RNA interference regulate expression of the small temporal RNAs that control C. elegans developmental timing. Cell 106, 23-34 (2001).
[0255] 23. Hutvagner, G., McLachlan, J., Pasquineri, A. E., Balint, E., Tuschl, T., & Zamore, P. D. A cellular function for the RNA-interference enzyme Dicer in the maturation of the let-7 small temporal RNA. Science 293, 834-838 (2001).
[0256] 24. Ketting, R. F., Fischer, S. E., Bernstein, E., Sijen, T, Hannon, G. J., & Plasterk, R. H. Dicer functions in RNA interference and in synthesis of small RNA involved in developmental timing in C. elegans. Genes Dev. 15, 2654-2659 (2001).
[0257] 25. Martinez, J., Patkaniowska, A., Urlaub, H., Luhrmann, R., & Tuschl, T. Single-stranded antisense siRNAs guide target RNA cleavage in RNAi. Cell 110, 563-574 (2002).
[0258] 26. Zeng, Y, Wagner, E. J., & Cullen, B. R. Both natural and designed micro RNAs can inhibit the expression of cognate mRNAs when expressed in human cells. Mol. Cell. 9, 1327-1333 (2002).
[0259] 27. Zeng, Y., & Cullen, B. R. Sequence requirements for microRNA processing and function in human cells. RNA 9, 112-123 (2003).
[0260] 28. Lai, E. C., and Posakony, J. W. (1997) The Bearded box, a novel 3′ UTR sequence motif, mediates negative post-transcriptional regulation of Bearded and Enhancer of split Complex gene expression Development 124: 4847-4856.
[0261] 29. Lai, E. C., Burks, C., and Posakony, J. W. (1998) The K box, a conserved 3′ UTR sequence motif, negatively regulates accumulation of enhancer of split complex transcripts. Development 125: 4077-4088.
[0262] 30. Lai, E. C. (2002) Micro RNAs are complementary to 3′ UTR sequence motifs that mediate negative post-transcriptional regulation. Nature Genet. 30: 363-364.
[0263] 31. Feder, J. N., Li, L., Jan, L. Y., and Jan, Y. N. (1994) Genomic cloning and chromosomal localization of HRY, the human homolog to the Drosophila segmentation gene, hairy. Genomics, 20: 56-61.
[0264] 32. Ohtsuka, T., Ishibashi, M., Gradwohl, G., Nakanishi, S., Guillemot, F., & Kageyama, R. Hes1 and Hes5 as notch effectors in mammalian neuronal differentiation. EMBO J. 18, 2196-2207 (1999).
[0265] 33. Kageyama, R., Ohtsuka, T., & Tomita, K The bHLH gene Hes1 regulates differentiation of multiple cell types. Mol. Cells 29, 1-7 (2000).
[0266] 34. Ohtsuka, T., Sakamoto, M., Guillemot, F., & Kageyama, R. Roles of the basic helix-loop-helix genes Hes1 and Hes5 in expansion of neural stem cells of the developing brain. J. Biol. Chem. 276, 30467-30474 (2001).
[0267] 35. Scott, H. S., Chen, H., Rossier, C., Lalioti, M. D., and Antonarakis, S. E. (1997) Isolation of a human gene MES1) with homology to an Escherichia coli and a zebrafish protein that maps to chromosome 21q22.3. Human Genet. 99: 616-623.
[0268] 36. Cheung, W. M., Chu, P. W., Lung, C. H., & Ip, N.Y. Expression of retinoid receptors during the retinoic acid-induced neuronal differentiation of human embryonal carcinoma cells. J. Neurochem. 75, 34.40 (2000).
[0269] 37. Elbashir, S. M., Harborth, J., Lendeckel, W., Yalcin, A., Weber, K, & Thschl, T. Duplexes of 21-nucleotide RNAs mediate RNA interference in mammalian cell culture. Nature 411, 494-498 (2001).
[0270] 38. McManus, M. T. & Sharp P. A. Gene silencing in mammals by small interfering RNAs. Nature Reviews Genetics 3, 737-747 (2002).
[0271] 39. Fire A, Xu S., Montgomery, M. K, Kostas, S. A., Driver, S. E., & Mello, C. C. Potent and specific genetic interference by double-stranded RNA in Caenorhabditis elegans. Nature 391, 806-811 (1998).
[0272] 40. Hammond, S. M., Caudy, A. A., & Hannon, G. J. Post-transcriptional gene silencing by double-stranded RNA. Nature Reviews Genetics 2, 110-119 (2001).
[0273] 41. Pleasure, S. J., & Lee, V. M. NTera 2 cells: a human cell line which displays characteristics expected of a human committed neuronal progenitor cell. J. Neuzosci. Res. 35, 585-602 (1993).
[0274] 42. Kurie, J. M., Brown, P., Salk, E., Scheinberg, D., Birrer, M., Deutsch, P., & Dmitrovsky, E. Cooperation between retinoic acid and phorbol esters enhances human teratocarcinoma differentiation. Differentiation 54, 115-122 (1993).
[0275] 43. Hutvagner, G., & Zamore, P. D. A microRNA in a multiple-turnover RNAi enzyme complex. Science 297, 2056-2060 (2002).
[0276] 44. Brennecke, J., Hipfuer, D. R., Stark, A., Russell, R. B., & Cohen, S. M. bantam Encodes a Developmentally Regulated microRNA that Controls Cell Proliferation and Regulates the Proapoptotic Gene hid in Drosophila. Cell 113, 25-36 (2003).
[0277] 45. Kawasaki, H., Eckner, R., Yao, T. P., Taira, K., Chiu, R., Livingston, D. M., & Yokoyama, K. K. Distinct roles of the co-activators p300 and CBP in retinoic-acid-induced F9-cell differentiation. Nature 393, 284-289 (1998).

### OTHER EMBODIMENTS

[0278] It is to be understood that while the invention has been described in conjunction with the detailed description thereof the foregoing description is intended to illustrate and not limit the scope of the invention, which is defined by the scope of the appended claims. Other aspects, advantages, and modifications are within the scope of the following claims.

TABLE 1

| miRNA | miRNA Target | Accession No. | miRNA Target | Accession No. | miRNA Target | Accession No. |
|---|---|---|---|---|---|---|
| miR-1 | dbl | X12556 | | | | |
| miR-2-1 | TGFBI | NM_000660 | | | | |
| miR-5 | TGF alpha | NM_003236 | | | | |
| miR-7 | V-Myb | NM_005375 | a-myb | X66087 | | |
| miR-8 | c-cbl | X57110 | Jagged1 | NM_000214 | | |
| miR-11 | SNO I (N, A) | Z19588 | | | | |
| miR-12 | Activin beta | AF412024 | | | | |
| miR-13 | Myf-5 | NM_005593 | | | | |
| miR-14 | FGF9 | NM_002010 | SHOTb | AJ002368 | SHOTa | AJ002367 |
| miR-15 | RON | X70040 | | | | |
| miR-16 | SMURF1 | NM_020429 | | | | |
| miR-17 | jagged 2 | NM_002226 | DAPK3 | NM_001348 | | |
| miR-18 | JunB | X51345 | RAD51 | NM_002875 | ING1 | NM_198219 |
| miR-19 | MBD4 | NM_003925 | MED1 | AF114784 | | |
| miR-20 | ZIP Kinase | AB022341 | | | | |
| miR-21 | Endomucin | NM_016242 | HUS1 | NM_004507 | V-ETS | NM_004449 |
| miR-22 | IPAF | AY035391 | | | | |
| miR-23 | HES1 | NM_005524 | HES1 | Y07572 | | |
| miR-24 | TGF-B3 | NM_003239 | CALDESMON | NM_033138 | RTN4 | NM_020532 |
| miR-25 | enaptin | AF535142 | VENTX2 | NM_014468 | NOD2 | AF178930.1 |
| miR-26 | AMPD3 | M84721 | EGR2 | J04076 | | |
| miR-27 | IL1A | AF536338 | NOTCH3 | U97669 | IL6R | NM_000565 |
| miR-28 | E2F6 | NM_001952 | | | | |
| miR-29 | laminin alpha | NM_005559 | | | | |
| miR-30 | DNA Pol alpha | NM_002689 | | | | |
| miR-31 | LTK | NM_002344 | | | | |
| miR-32 | HOXD1 | NM_024501 | | | | |
| miR-33 | laminin gamma | NM_002293 | | | | |
| miR-34 | TNFR1 | BC010140 | | | | |
| miR-92 | Villin2 | NM_003379 | Lin28 | NM_024674 | | |
| miR-93 | Frizzled homolog 5 | NM_003468 | | | | |
| miR-94 | ACF1 | AF213467 | | | | |
| miR-95 | MSX2 | X69295 | PML3 | M79464 | PML2 | M79463 |
| miR-96 | ADFP | NM_001122 | | | | |
| miR-97 | Myf-4 | NM_002479 | | | | |
| miR-98 | Sox-5 | NM_006940 | | | | |
| miR-99 | Notch1 | NM_017617 | MYCBP | NM_012333 | | |
| miR-100 | ErbB2 | M11730 | Tob | NM_005749 | DLG1 | NM_004087 |
| miR-101 | DNA Pol theta | NM_006596 | NAV3 | NM_014903 | YAP1 | NM_006106 |
| miR-103 | CREB3 | NM_006368 | | | | |
| miR-104 | Timeless | BC050557 | MAST1 | AF347693 | | |
| miR-105 | RAD52 | NM_002879 | | | | |
| miR-106 | TLR4 | NM_138554 | HECA | NM_016217 | | |
| miR-107 | CREB3 | NM_006368 | MAP6 | XM_166256 | | |
| miR-109 | SOX9 | NM_000346 | | | | |
| miR-110 | HOXA5 | NM_019102 | | | | |
| miR-111 | CDC42 | BC018266 | | | | |
| miR-112 | Desmuslin | NM_145728 | MBD1 | NM_015846 | | |
| miR-113 | TFIIIC Box B-binding subunit | U02619 | | | | |
| miR-114 | profilin 2 | NM_053024.1 | | | | |
| miR-116 | c-fms | X03663 | | | | |
| miR-119 | HES1 | NM_005524 | | | | |
| miR-122 | Delta1 (DLL1) | NM_005618 | | | | |
| miR-125 | FACL5 | NM_016234 | | | | |
| miR-126 | DLGAP2 | NM_004745 | | | | |
| miR-127 | TFIIIC Box B-binding subunit | U02619 | EPHA5 | NM_004439 | CD14 | NM_000591 |
| miR-129 | TFIIH | AB088103.1 | RPC32 | NM_006467 | | |
| miR-130 | RPC2 | NM_018082 | NOVA1 | NM_002515 | | |
| miR-132 | RecQ5 | NM_004259 | | | | |
| miR-133 | METH2 | AF060153 | | | | |
| miR-134 | MOST2 | NM_020250 | | | | |
| miR-136 | SOX7 | NM_031439 | | | | |
| miR-138 | Intergin B1 | X07979 | | | | |
| miR-140 | Desmin | NM_001927 | | | | |
| miR-141 | POT1 | NM_015450 | ATF1 | NM_005171 | | |
| miR-144 | V-myb | NM_005375 | | | | |
| miR-145 | HLX1 | NM_021958 | | | | |
| miR-146 | GABA Transport protein | U76343 | IRBP | M22453 | | |
| miR-147 | V-myc | NM_005378 | | | | |
| miR-148 | BAG5 | AF095195 | E2F3 | NM_001949 | | |
| miR-149 | PLAB | U88323 | | | | |
| miR-150 | BAF600 | AF348492.1 | MEST | NM_002402 | | |
| miR-151 | ALK-4 | Z22536 | | | | |
| miR-153 | TLL2 | NM_012465 | | | | |
| miR-154 | RIGB | AF525085 | BMP3 | NM_001201 | | |
| miR-157 | POT1 (J) | NM_015450 | | | | |
| miR-158 | ERCC3 (J) | M31899 | | | | |
| miR-160 | TBX22 (J) | NM_016954 | EPHA3 | NM_005233 | | |
| miR-162 | BAP1 (J) | AF045581 | | | | |
| miR-164 | SP3 (J) | NM_003111 | | | | |
| miR-172 | TNFR1 | BC010140 | MBD5 | NM_018328 | | |
| miR-173 | TEF1 (D) | X84839 | | | | |
| miR-174 | FOXA3 | NM_004497 | FGF12 | NM_021032 | | |
| miR-175 | ELF2 | AF256222 | B-myb | X13293 | | |
| miR-176 | MAP1A | NM_002373 | | | | |
| miR-177 | Myosin 5B | AY274809 | | | | |
| miR-178 | NEDL1 (D | AB048365 | | | | |
| miR-179 | MINT1 (D) | AF029106 | RNA helicase A (D) | L13848 | | |
| miR-180 | PARX (D) | AF439781 | MMP26 (D) | NM_021801 | NDR (D) | AY255672 |
| miR-182 | ERBB3 (T) | M29366 | | | | |
| miR-183 | FOXA3 | NM_004497 | | | | |
| miR-184 | MMP3 (D) | AF405705 | Crossveinless-2 (D) | AY324650 | | |
| miR-185 | VE-CADHERIN | X79981 | CADHERIN5 | NM_001795 | | |
| miR-186 | MAP2 (D) | NM_002374 | | | | |
| miR-187 | TAFII55 | NM_005642 | EIF4AI | NM_001416 | | |
| miR-188 | EFG2 | NM_032380 | | | | |
| miR-189 | Eab1 (D) | U71207 | TWEAK (D) | AF030099 | | |
| miR-191 | PAX3 | NM_181457 | FKHR | UO2310 | | |
| miR-192 | Synaptotagmin1 (D) 3UTR | U19921 | | | | |
| miR-193 | HDAC5 | NM_005474 | Myf5 | NM_005593 | CBP | NM_004380 |
| miR-195 | hHDC | AB033492 | | | | |
| miR-196 | HOXB8 | NM_024016 | HOXB7 Promoter | AJ414528 | | |
| miR-197 | FRK | NM_002031 | PAX3 5-UTR | AJ007392 | V-ski | NM_003036 |
| miR-199 | FAST1 | AF076292 | | | | |
| miR-201 | La antigen | X97869.1 | | | | |
| miR-203 | MLH1 | NM_000249 | | | | |
| miR-205 | ELF3 | AF517841 | | | | |
| miR-224 | B-Myb | X13293 | | | | |

| miRNA | miRNA Target | Accession No. | miRNA Target | Accession No. | miRNA Target | Accession No. |
|---|---|---|---|---|---|---|
| miR-1 | | | | | | |
| miR-2-1 | | | | | | |
| miR-5 | | | | | | |
| miR-7 | | | | | | |
| miR-8 | | | | | | |
| miR-11 | | | | | | |
| miR-12 | | | | | | |
| miR-13 | | | | | | |
| miR-14 | | | | | | |
| miR-15 | | | | | | |
| miR-16 | | | | | | |
| miR-17 | | | | | | |
| miR-18 | | | | | | |
| miR-19 | | | | | | |
| miR-20 | | | | | | |
| miR-21 | SDK1 | NM_152744 | | | | |
| miR-22 | | | | | | |
| miR-23 | | | | | | |
| miR-24 | | | | | | |
| miR-25 | | | | | | |
| miR-26 | | | | | | |
| miR-27 | BMPR2 | NM_001204 | | | | |
| miR-28 | | | | | | |
| miR-29 | | | | | | |
| miR-30 | | | | | | |
| miR-31 | | | | | | |
| miR-32 | | | | | | |
| miR-33 | | | | | | |
| miR-34 | | | | | | |
| miR-92 | | | | | | |
| miR-93 | | | | | | |
| miR-94 | | | | | | |
| miR-95 | | | | | | |
| miR-96 | | | | | | |
| miR-97 | | | | | | |
| miR-98 | | | | | | |
| miR-99 | | | | | | |
| miR-100 | PDCD10 | NM_007217 | BNIP2 | NM_004330 | | |
| miR-101 | CDK7 | NM_001239 | Importin beta2 | BC040340 | V-ros | NM_002944 |
| miR-103 | | | | | | |
| miR-104 | | | | | | |
| miR-105 | | | | | | |
| miR-106 | | | | | | |
| miR-107 | | | | | | |
| miR-109 | | | | | | |
| miR-110 | | | | | | |
| miR-111 | | | | | | |
| miR-112 | | | | | | |
| miR-113 | | | | | | |
| miR-114 | | | | | | |
| miR-116 | | | | | | |
| miR-119 | | | | | | |
| miR-122 | | | | | | |
| miR-125 | | | | | | |
| miR-126 | | | | | | |
| miR-127 | mdm1 | NM_017440 | | | | |
| miR-129 | | | | | | |
| miR-130 | | | | | | |
| miR-132 | | | | | | |
| miR-133 | | | | | | |
| miR-134 | | | | | | |
| miR-136 | | | | | | |
| miR-138 | | | | | | |
| miR-140 | | | | | | |
| miR-141 | | | | | | |
| miR-144 | | | | | | |
| miR-145 | | | | | | |
| miR-146 | | | | | | |
| miR-147 | | | | | | |
| miR-148 | | | | | | |
| miR-149 | | | | | | |
| miR-150 | | | | | | |
| miR-151 | | | | | | |
| miR-153 | | | | | | |
| miR-154 | | | | | | |
| miR-157 | | | | | | |
| miR-158 | | | | | | |
| miR-160 | | | | | | |
| miR-162 | | | | | | |
| miR-164 | | | | | | |
| miR-172 | | | | | | |
| miR-173 | | | | | | |
| miR-174 | | | | | | |
| miR-175 | | | | | | |
| miR-176 | | | | | | |
| miR-177 | | | | | | |
| miR-178 | | | | | | |
| miR-179 | | | | | | |
| miR-180 | | | | | | |
| miR-182 | | | | | | |
| miR-183 | | | | | | |
| miR-184 | | | | | | |
| miR-185 | | | | | | |
| miR-186 | | | | | | |
| miR-187 | | | | | | |
| miR-188 | | | | | | |
| miR-189 | | | | | | |
| miR-191 | | | | | | |
| miR-192 | | | | | | |
| miR-193 | | | | | | |
| miR-195 | | | | | | |
| miR-196 | | | | | | |
| miR-197 | | | | | | |
| miR-199 | | | | | | |
| miR-201 | | | | | | |
| miR-203 | | | | | | |
| miR-205 | | | | | | |
| miR-224 | | | | | | |

The application's sequence listing, which the Patent Office published only in electronic form, follows.

SEQUENCE LISTING (518 sequences)

SEQ ID NO: 1 - RNA, 22 nt, Homo sapiens
aucacauugccagggauuucca

SEQ ID NO: 2 - RNA, 19 nt, artificial
  Artificial Construct
ugacaggaagcaaauccca

SEQ ID NO: 3 - RNA, 22 nt, artificial
  Artificial Construct
augucauugggagggauuagca

SEQ ID NO: 4 - RNA, 19 nt, artificial
  Artificial Construct
ugacuggaugcuaaugcca

SEQ ID NO: 5 - RNA, 22 nt, Homo sapiens
uggaggccguggcggaacugag

SEQ ID NO: 6 - RNA, 22 nt, Homo sapiens
aggacuuuuuugauuaaguggu

SEQ ID NO: 7 - RNA, 22 nt, Homo sapiens
cgagauuucuuuuuuaugugau

SEQ ID NO: 8 - RNA, 22 nt, artificial
  Artificial Construct
cccaggccguggcccaaccccg

SEQ ID NO: 9 - RNA, 22 nt, artificial
  Artificial Construct
cccacuuuuuccauuaaguccc

SEQ ID NO: 10 - RNA, 22 nt, artificial
  Artificial Construct
cgagauuucuuuuuucccuccc

SEQ ID NO: 11 - RNA, 21 nt, Homo sapiens
uggaacucacuggaaagugac

SEQ ID NO: 12 - RNA, 23 nt, Mus musculus
aucacauugccagggauuaccac

SEQ ID NO: 13 - RNA, 23 nt, Mus musculus
guggagaccguggcggaacugag

SEQ ID NO: 14 - RNA, 22 nt, Homo sapiens
uggaauguaaagaaguauggag

SEQ ID NO: 15 - RNA, 23 nt, Homo sapiens
uaucacagccagcuuugaugagc

SEQ ID NO: 16 - RNA, 23 nt, Homo sapiens
aaaggaacgaucguugugauaug

SEQ ID NO: 17 - RNA, 23 nt, Homo sapiens
uggaagacuagugauuuuguugu

SEQ ID NO: 18 - RNA, 23 nt, Homo sapiens
uaauacugucagguaaagauguc

SEQ ID NO: 19 - RNA, 21 nt, Homo sapiens
caucacagucugaguucuugc

SEQ ID NO: 20 - RNA, 23 nt, Homo sapiens
ugaguauuacaucagguacuggu

SEQ ID NO: 21 - RNA, 22 nt, Homo sapiens
uaucacagccauuuugaugagu

SEQ ID NO: 22 - RNA, 21 nt, Homo sapiens
ucagucuuuuucucucuccua

SEQ ID NO: 23 - RNA, 22 nt, Homo sapiens
uagcagcacauaaugguuugug

SEQ ID NO: 24 - RNA, 22 nt, Homo sapiens
uagcagcacguaaauauuggcg

SEQ ID NO: 25 - RNA, 20 nt, Homo sapiens
acugcagugaaggcacuugu

SEQ ID NO: 26 - RNA, 22 nt, Homo sapiens
uaaggugcaucuagugcagaua

SEQ ID NO: 27 - RNA, 23 nt, Homo sapiens
ugugcaaaucuaugcaaaacuga

SEQ ID NO: 28 - RNA, 23 nt, Homo sapiens
uaaagugcuuauagugcagguag

SEQ ID NO: 29 - RNA, 22 nt, Homo sapiens
uagcuuaucagacugauguuga

SEQ ID NO: 30 - RNA, 22 nt, Homo sapiens
aagcugccaguugaagaacugu

SEQ ID NO: 31 - RNA, 22 nt, Homo sapiens
uggcucaguucagcaggaacag

SEQ ID NO: 32 - RNA, 22 nt, Homo sapiens
cauugcacuugucucggucuga

SEQ ID NO: 33 - RNA, 22 nt, Homo sapiens
uucaaguaauccaggauaggcu

SEQ ID NO: 34 - RNA, 22 nt, Homo sapiens
uucacaguggcuaaguuccgcc

SEQ ID NO: 35 - RNA, 22 nt, Homo sapiens
aaggagcucacagucuauugag

SEQ ID NO: 36 - RNA, 22 nt, Homo sapiens
cuagcaccaucugaaaucgguu

SEQ ID NO: 37 - RNA, 22 nt, Homo sapiens
cuuucagucggauguuugcagc

SEQ ID NO: 38 - RNA, 21 nt, Homo sapiens
ggcaagaugcuggcauagcug

SEQ ID NO: 39 - RNA, 21 nt, Homo sapiens
uauugcacauuacuaaguugc

SEQ ID NO: 40 - RNA, 19 nt, Homo sapiens
gugcauuguaguugcauug

SEQ ID NO: 41 - RNA, 22 nt, Homo sapiens
aggcaguguaguuagcugauug

SEQ ID NO: 42 - RNA, 22 nt, Homo sapiens
uauugcacuugucccggccugu

SEQ ID NO: 43 - RNA, 22 nt, Homo sapiens
aaagugcuguucgugcagguag

SEQ ID NO: 44 - RNA, 20 nt, Homo sapiens
aaagugcugacagugcagau

SEQ ID NO: 45 - RNA, 22 nt, Homo sapiens
uucaacggguauuuauugagca

SEQ ID NO: 46 - RNA, 22 nt, Homo sapiens
uuuggcacuagcacauuuuugc

SEQ ID NO: 47 - RNA, 23 nt, Homo sapiens
uguaaacauccucgacuggaagc

SEQ ID NO: 48 - RNA, 22 nt, Homo sapiens
ugagguaguaaguuguauuguu

SEQ ID NO: 49 - RNA, 20 nt, Homo sapiens
acccguagauccgaucuugu

SEQ ID NO: 50 - RNA, 22 nt, Homo sapiens
aacccguagauccgaacuugug

SEQ ID NO: 51 - RNA, 20 nt, Homo sapiens
uacaguacugugauaacuga

SEQ ID NO: 52 - RNA, 23 nt, Homo sapiens
agcagcauuguacagggcuauga

SEQ ID NO: 53 - RNA, 22 nt, Homo sapiens
ucaacaucagucugauaagcua

SEQ ID NO: 54 - RNA, 20 nt, Homo sapiens
ucaaaugcucagacuccugu

SEQ ID NO: 55 - RNA, 24 nt, Homo sapiens
aaaagugcuuacagugcagguagc

SEQ ID NO: 56 - RNA, 23 nt, Homo sapiens
agcagcauuguacagggcuauca

SEQ ID NO: 57 - RNA, 20 nt, Homo sapiens
cuggucgagucggccugcgc

SEQ ID NO: 58 - RNA, 17 nt, Homo sapiens
ucgagcggccgacgucg

SEQ ID NO: 59 - RNA, 23 nt, Homo sapiens
ugugcaaaucuaugcaaaacugu

SEQ ID NO: 60 - RNA, 19 nt, Homo sapiens
gguccugacauccacggaa

SEQ ID NO: 61 - RNA, 22 nt, Homo sapiens
ucgagcccuggugcgcccacca

SEQ ID NO: 62 - RNA, 22 nt, Homo sapiens
uagcugcacguaaauauuggcg

SEQ ID NO: 63 - RNA, 26 nt, Homo sapiens
uugauccuggcucaggacgaacgcug

SEQ ID NO: 64 - RNA, 18 nt, Homo sapiens
auugccagggauuaccau

SEQ ID NO: 65 - RNA, 23 nt, Homo sapiens
uggagugugacaaugguguuugu

SEQ ID NO: 66 - RNA, 23 nt, Homo sapiens
ucccugagacccuuuaaccugug

SEQ ID NO: 67 - RNA, 21 nt, Homo sapiens
ucguaccgugaguaauaaugc

SEQ ID NO: 68 - RNA, 22 nt, Homo sapiens
ucggauccgucugagcuuggcu

SEQ ID NO: 69 - RNA, 21 nt, Homo sapiens
cuuuuuucggucugggcuugc

SEQ ID NO: 70 - RNA, 20 nt, Homo sapiens
cagugcaauguuaaaagggc

SEQ ID NO: 71 - RNA, 23 nt, Homo sapiens
uaacagucuacagccauggucgu

SEQ ID NO: 72 - RNA, 22 nt, Homo sapiens
uugguccccuucaaccagcugu

SEQ ID NO: 73 - RNA, 22 nt, Homo sapiens
ugugacugguugaccagaggga

SEQ ID NO: 74 - RNA, 23 nt, Homo sapiens
acuccauuuguuuugaugaugga

SEQ ID NO: 75 - RNA, 17 nt, Homo sapiens
agcugguguugugaauc

SEQ ID NO: 76 - RNA, 22 nt, Homo sapiens
uaccacaggguagaaccacgga

SEQ ID NO: 77 - RNA, 21 nt, Homo sapiens
aacacugucugguaaagaugg

SEQ ID NO: 78 - RNA, 22 nt, Homo sapiens
uacaguauagaugauguacuag

SEQ ID NO: 79 - RNA, 24 nt, Homo sapiens
guccaguuuucccaggaaucccuu

SEQ ID NO: 80 - RNA, 23 nt, Homo sapiens
ugagaacugaauuccauggguuu

SEQ ID NO: 81 - RNA, 21 nt, Homo sapiens
guguguggaaaugcuucugcc

SEQ ID NO: 82 - RNA, 22 nt, Homo sapiens
ucagugcacuacagaacuuugu

SEQ ID NO: 83 - RNA, 22 nt, Homo sapiens
ucuggcuccgugucuucacucc

SEQ ID NO: 84 - RNA, 23 nt, Homo sapiens
ucucccaacccuuguaccagugu

SEQ ID NO: 85 - RNA, 22 nt, Homo sapiens
cuagacugaggcuccuugaggu

SEQ ID NO: 86 - RNA, 20 nt, Homo sapiens
uugcauagucacaaaaguga

SEQ ID NO: 87 - RNA, 22 nt, Homo sapiens
uagguuauccguguugccuucg

SEQ ID NO: 88 - RNA, 24 nt, Homo sapiens
uaacacugucugguaaagauggcu

SEQ ID NO: 89 - RNA, 22 nt, Homo sapiens
ugaccuaugaauugacagccag

SEQ ID NO: 90 - RNA, 22 nt, Homo sapiens
uaauacugccugguaaugauga

SEQ ID NO: 91 - RNA, 23 nt, Homo sapiens
uacccuguagaaccgaauuugug

SEQ ID NO: 92 - RNA, 23 nt, Homo sapiens
cccaguguuuagacuaucuguuc

SEQ ID NO: 93 - RNA, 23 nt, Homo sapiens
uggcagugucuuagcugguuguu

SEQ ID NO: 94 - RNA, 21 nt, Homo sapiens
cacggggagguagugacgaaa

SEQ ID NO: 95 - RNA, 22 nt, Homo sapiens
uauggcacugguagaauucacu

SEQ ID NO: 96 - RNA, 23 nt, Homo sapiens
caagucacuagugguuccguuua

SEQ ID NO: 97 - RNA, 18 nt, Homo sapiens
ggacugccucagcugugc

SEQ ID NO: 98 - RNA, 20 nt, Homo sapiens
guguccuaaggugagcucag

SEQ ID NO: 99 - RNA, 24 nt, Homo sapiens
aacauucaacgcugucggugaguu

SEQ ID NO: 100 - RNA, 22 nt, Homo sapiens
gguugauaggucggggguguaa

SEQ ID NO: 101 - RNA, 24 nt, Homo sapiens
auuucaggugaaguuucaagaguc

SEQ ID NO: 102 - RNA, 22 nt, Homo sapiens
uuuggcaaugguagaacucaca

SEQ ID NO: 103 - RNA, 23 nt, Homo sapiens
uauggcacugguagaauucacug

SEQ ID NO: 104 - RNA, 23 nt, Homo sapiens
augcaagucgagcuugaaguuuc

SEQ ID NO: 105 - RNA, 18 nt, Homo sapiens
uggagagaaaggcaguuc

SEQ ID NO: 106 - RNA, 23 nt, Homo sapiens
cggccuuagucgucggggugauu

SEQ ID NO: 107 - RNA, 22 nt, Homo sapiens
ucgugucuuguguugcagccgg

SEQ ID NO: 108 - RNA, 22 nt, Homo sapiens
caucccuugcaugguggagggu

SEQ ID NO: 109 - RNA, 22 nt, Homo sapiens
cguagacccgaaaccgggugac

SEQ ID NO: 110 - RNA, 22 nt, Homo sapiens
caacggaaucccaaaagcagcu

SEQ ID NO: 111 - RNA, 18 nt, Homo sapiens
cugaccuaugaauugaca

SEQ ID NO: 112 - RNA, 21 nt, Homo sapiens
aacuggccuacaaagucccag

SEQ ID NO: 113 - RNA, 21 nt, Homo sapiens
uagcagcacagaaauauuggc

SEQ ID NO: 114 - RNA, 21 nt, Homo sapiens
uagguaguuucauguuguugg

SEQ ID NO: 115 - RNA, 22 nt, Homo sapiens
uucaccaccuucuccacccagc

SEQ ID NO: 116 - RNA, 22 nt, Homo sapiens
uacaguagucugcacauugguu

SEQ ID NO: 117 - RNA, 21 nt, Homo sapiens
uacucaguaaggcauuguucu

SEQ ID NO: 118 - RNA, 22 nt, Homo sapiens
ugaaauguuuaggaccacuaga

SEQ ID NO: 119 - RNA, 22 nt, Homo sapiens
uccuucauuccaccggagucug

SEQ ID NO: 120 - RNA, 23 nt, Homo sapiens
caagucacuagugguuccguuua

SEQ ID NO: 121 - RNA, 22 nt, Homo sapiens
gcacauacuucuuuucuuucau

SEQ ID NO: 122 - RNA, 23 nt, Homo sapiens
ccuccuccugccugucugcacua

SEQ ID NO: 123 - RNA, 23 nt, Homo sapiens
cucaucccuaggaauuuucauua

SEQ ID NO: 124 - RNA, 23 nt, Homo sapiens
ucaguaaaagcauuacucuaagu

SEQ ID NO: 125 - RNA, 23 nt, Homo sapiens
gacaucuuuacccgacucuuuca

SEQ ID NO: 126 - RNA, 21 nt, Homo sapiens
gaacucacucagacuguguug

SEQ ID NO: 127 - RNA, 23 nt, Homo sapiens
gccaguaccuccuguuguguccc

SEQ ID NO: 128 - RNA, 22 nt, Homo sapiens
gcucaucaaaaugucucuggug

SEQ ID NO: 129 - RNA, 21 nt, Homo sapiens
gaggagagagagagagacuga

SEQ ID NO: 130 - RNA, 22 nt, Homo sapiens
uggggaccauuaugugcagcug

SEQ ID NO: 131 - RNA, 22 nt, Homo sapiens
ggacaauauuuacauguugcaa

SEQ ID NO: 132 - RNA, 20 nt, Homo sapiens
acaagugccuucacacagac

SEQ ID NO: 133 - RNA, 22 nt, Homo sapiens
gaucugcacaagaugaaccacg

SEQ ID NO: 134 - RNA, 23 nt, Homo sapiens
ucuguuaugcauagcuuugcacu

SEQ ID NO: 135 - RNA, 23 nt, Homo sapiens
cuaccugcacucuaagcgcaucg

SEQ ID NO: 136 - RNA, 22 nt, Homo sapiens
ucaaccucagucugauaaagag

SEQ ID NO: 137 - RNA, 22 nt, Homo sapiens
uuuguucuucaacuggaagcag

SEQ ID NO: 138 - RNA, 22 nt, Homo sapiens
cuggcccugcugaacuuugcca

SEQ ID NO: 139 - RNA, 22 nt, Homo sapiens
gaagacccagacaaguggaagg

SEQ ID NO: 140 - RNA, 22 nt, Homo sapiens
ggccuaaacuggauuuccuuau

SEQ ID NO: 141 - RNA, 22 nt, Homo sapiens
ggaggaccagagcuacugacua

SEQ ID NO: 142 - RNA, 22 nt, Homo sapiens
accauuagacugugagcuccuu

SEQ ID NO: 143 - RNA, 22 nt, Homo sapiens
aaccggaagcaaggagugcuag

SEQ ID NO: 144 - RNA, 22 nt, Homo sapiens
gcuggaaacaucagccugaagg

SEQ ID NO: 145 - RNA, 21 nt, Homo sapiens
uagcuuugccagcaucuugga

SEQ ID NO: 146 - RNA, 21 nt, Homo sapiens
cucacuuagucaugugcaauu

SEQ ID NO: 147 - RNA, 19 nt, Homo sapiens
cuuugcgccugcaauggac

SEQ ID NO: 148 - RNA, 18 nt, Homo sapiens
aaaccacccagacacgcc

SEQ ID NO: 149 - RNA, 22 nt, Homo sapiens
caaggccgggacaaguacaaga

SEQ ID NO: 150 - RNA, 22 nt, Homo sapiens
cuaccugcacgaacagcacuuu

SEQ ID NO: 151 - RNA, 20 nt, Homo sapiens
aucugcacugucugcaguug

SEQ ID NO: 152 - RNA, 22 nt, Homo sapiens
gguuuaguaauuuucugcuuaa

SEQ ID NO: 153 - RNA, 22 nt, Homo sapiens
ucagauuguugccaaugccaaa

SEQ ID NO: 154 - RNA, 23 nt, Homo sapiens
gcugccauccgaccaaggucucc

SEQ ID NO: 155 - RNA, 22 nt, Homo sapiens
aaaaagaaaaaugaauuucucu

SEQ ID NO: 156 - RNA, 20 nt, Homo sapiens
acaaaauaagaacgaggauu

SEQ ID NO: 157 - RNA, 22 nt, Homo sapiens
cacagcuuaugcccuauggcug

SEQ ID NO: 158 - RNA, 20 nt, Homo sapiens
ucaguuaucacaggauggau

SEQ ID NO: 159 - RNA, 19 nt, Homo sapiens
ccacggacgggcgcgccgc

SEQ ID NO: 160 - RNA, 22 nt, Homo sapiens
gcuguuaucagacugaugguga

SEQ ID NO: 161 - RNA, 20 nt, Homo sapiens
gugggagucugugcauuugu

SEQ ID NO: 162 - RNA, 24 nt, Homo sapiens
ucugccuucacuacagagacuuua

SEQ ID NO: 163 - RNA, 23 nt, Homo sapiens
ugaccucccugaacauuucacgc

SEQ ID NO: 164 - RNA, 20 nt, Homo sapiens
cugcaggccgacucgccaca

SEQ ID NO: 165 - RNA, 17 nt, Homo sapiens
cagcgucggccgcucgg

SEQ ID NO: 166 - RNA, 23 nt, Homo sapiens
uaugcuuagcauagauuugcagc

SEQ ID NO: 167 - RNA, 19 nt, Homo sapiens
uuccguggaugucaagaag

SEQ ID NO: 168 - RNA, 16 nt, Homo sapiens
  misc_feature: Corresponds to residues 5379 to 5394 of GenBank Accession U02619
uggugggcgcaccagg

SEQ ID NO: 169 - RNA, 19 nt, Homo sapiens
  misc_feature: Corresponds to residues 1647 to 1629 of GenBank Accession NM_0530 24.1
ccaauuuuuauuugcagcu

SEQ ID NO: 170 - RNA, 26 nt, Homo sapiens
ccaaguucauucagagccaggacuau

SEQ ID NO: 171 - RNA, 22 nt, Homo sapiens
uggaggccguggcggaacugag

SEQ ID NO: 172 - RNA, 23 nt, Homo sapiens
acaaacacugccuuuauuguccu

SEQ ID NO: 173 - RNA, 23 nt, Homo sapiens
cacaaguucaagggucaaaggga

SEQ ID NO: 174 - RNA, 21 nt, Homo sapiens
ucauuauuacucaaaguaaaa

SEQ ID NO: 175 - RNA, 16 nt, Homo sapiens
  misc_feature: Corresponds to residues 5379 to 5394 of GenBank Accession U02619
uggugggcgcaccagg

SEQ ID NO: 176 - RNA, 14 nt, Homo sapiens
  misc_feature: Corresponds to residues 6322 to 6355 of GenBank Accession AB08810 3.1
gcaagcccagaccg

SEQ ID NO: 177 - RNA, 20 nt, Homo sapiens
augauuguaacauugcacug

SEQ ID NO: 178 - RNA, 23 nt, Homo sapiens
gcgaccauggcuguaguaaaagg

SEQ ID NO: 179 - RNA, 22 nt, Homo sapiens
acaucuuggugaaggggaccau

SEQ ID NO: 180 - RNA, 22 nt, Homo sapiens
cuccucuggucaacaaguccag

SEQ ID NO: 181 - RNA, 23 nt, Homo sapiens
gccaucaucgaaacuaauggggg

SEQ ID NO: 182 - RNA, 17 nt, Homo sapiens
uuagcacaacaccagcu

SEQ ID NO: 183 - RNA, 22 nt, Homo sapiens
ucacuggccaucccucgugguc

SEQ ID NO: 184 - RNA, 21 nt, Homo sapiens
ugauuuuuaccugacaguguu

SEQ ID NO: 185 - RNA, 22 nt, Homo sapiens
cuaguagaagaucugcaggaug

SEQ ID NO: 186 - RNA, 24 nt, Homo sapiens
aaggaggcccaggcccaaaaggac

SEQ ID NO: 187 - RNA, 23 nt, Homo sapiens
cagcccaaggaauucaguuuuac

SEQ ID NO: 188 - RNA, 21 nt, Homo sapiens
ugaggaugcacccccacagaa

SEQ ID NO: 189 - RNA, 22 nt, Homo sapiens
ccaaaguucugaagugccuuga

SEQ ID NO: 190 - RNA, 22 nt, Homo sapiens
ugaagcccgacacggagccagc

SEQ ID NO: 191 - RNA, 15 nt, Homo sapiens
  misc_feature: Corresponds to residues 1490 to 1504 of GenBank Accession AF34849 2.1
acaaggguugggaga

SEQ ID NO: 192 - RNA, 22 nt, Homo sapiens
accucaaggagccugagcaccc

SEQ ID NO: 193 - RNA, 20 nt, Homo sapiens
ccacuuuuguggcuaugaga

SEQ ID NO: 194 - RNA, 22 nt, Homo sapiens
gaaaggcaacacagauaaagaa

SEQ ID NO: 195 - RNA, 24 nt, Homo sapiens
uuugauuuuuaccugacaguguuu

SEQ ID NO: 196 - RNA, 22 nt, Homo sapiens
uuggcugugccuucauagguca

SEQ ID NO: 197 - RNA, 22 nt, Homo sapiens
gcaucauuacaauacaguauuu

SEQ ID NO: 198 - RNA, 22 nt, Homo sapiens
ccacggucccaacuacaggguc

SEQ ID NO: 199 - RNA, 23 nt, Homo sapiens
cuccaguuagucuaagcacuggu

SEQ ID NO: 200 - RNA, 23 nt, Homo sapiens
gaaaaccaccucagacacugccu

SEQ ID NO: 201 - RNA, 21 nt, Homo sapiens
uugcgucacuaccuccaaugg

SEQ ID NO: 202 - RNA, 22 nt, Homo sapiens
agugaaaucuaccaguggauca

SEQ ID NO: 203 - RNA, 23 nt, Homo sapiens
aaaacagaaggacuagugacaug

SEQ ID NO: 204 - RNA, 18 nt, Homo sapiens
ucacagcugaggcagccc

SEQ ID NO: 205 - RNA, 20 nt, Homo sapiens
gugaagucaccuuaggacaa

SEQ ID NO: 206 - RNA, 24 nt, Homo sapiens
aacucaccgacagcaccuccagag

SEQ ID NO: 207 - RNA, 22 nt, Homo sapiens
uuacacccccgacgagcccaaa

SEQ ID NO: 208 - RNA, 24 nt, Homo sapiens
ucuucuugaaacuugagcuuaaac

SEQ ID NO: 209 - RNA, 22 nt, Homo sapiens
ucucuacucuaccauugcccaa

SEQ ID NO: 210 - RNA, 23 nt, Homo sapiens
gagugaaaucuaccaguggauca

SEQ ID NO: 211 - RNA, 23 nt, Homo sapiens
guggagucaagcucgacuuucag

SEQ ID NO: 212 - RNA, 18 nt, Homo sapiens
gaacuggauuccacugga

SEQ ID NO: 213 - RNA, 23 nt, Homo sapiens
caucaccccgacgacucagcaau

SEQ ID NO: 214 - RNA, 22 nt, Homo sapiens
cgagcugcgccucucggcaaga

SEQ ID NO: 215 - RNA, 22 nt, Homo sapiens
acuaucuacuuaucaagccaug

SEQ ID NO: 216 - RNA, 22 nt, Homo sapiens
cgcagccgguuucgggagugug

SEQ ID NO: 217 - RNA, 22 nt, Homo sapiens
auuugcuugugugcgugcgugc

SEQ ID NO: 218 - RNA, 18 nt, Homo sapiens
uuccaauuuaaagggcca

SEQ ID NO: 219 - RNA, 21 nt, Homo sapiens
acccucauugcugugccacuc

SEQ ID NO: 220 - RNA, 21 nt, Homo sapiens
gacauuauuucgaugcuaaag

SEQ ID NO: 221 - RNA, 21 nt, Homo sapiens
ccaacaacaugaaacugccua

SEQ ID NO: 222 - RNA, 22 nt, Homo sapiens
gcaggacagucaaggugauaua

SEQ ID NO: 223 - RNA, 22 nt, Homo sapiens
agccucugagcaaaccccuguc

SEQ ID NO: 224 - RNA, 16 nt, Homo sapiens
  misc_feature: Corresponds to residues 8702 to 8717 of GenBank Accession X97869. 1
aggaugucuuugguuu

SEQ ID NO: 225 - RNA, 22 nt, Homo sapiens
auucugccuccuaaacauuuca

SEQ ID NO: 226 - RNA, 15 nt, Homo sapiens
  misc_feature: Corresponds to residues 8702 to 8717 of GenBank Accession X97869. 1
cagacuccgguggaa

SEQ ID NO: 227 - RNA, 23 nt, Homo sapiens
  misc_feature: Corresponds to residues 1357 to 1379 of GenBank Accession X13293
caagcggcagaggaagaggcgug

SEQ ID NO: 228 - RNA, 23 nt, Homo sapiens
gucagaaaaucacuagucuuaga

SEQ ID NO: 229 - RNA, 23 nt, Homo sapiens
caccguucaaccugacaguauua

SEQ ID NO: 230 - RNA, 21 nt, Homo sapiens
gaggagagagaaaaauaaugg

SEQ ID NO: 231 - RNA, 20 nt, Homo sapiens
agaggcggcccgaaugcagc

SEQ ID NO: 232 - RNA, 22 nt, Homo sapiens
ucucuacaaaaaaugcagaacu

SEQ ID NO: 233 - RNA, 23 nt, Homo sapiens
ucuguuaugcauagcuuugcacu

SEQ ID NO: 234 - RNA, 22 nt, Homo sapiens
ucaacaacacacaguuggauaa

SEQ ID NO: 235 - RNA, 22 nt, Homo sapiens
cuguuccugcugaagguguacg

SEQ ID NO: 236 - RNA, 22 nt, Homo sapiens
gaaaccugagacaagugcaauu

SEQ ID NO: 237 - RNA, 22 nt, Homo sapiens
agacuauccuggauucuuucca

SEQ ID NO: 238 - RNA, 22 nt, Homo sapiens
cgcgggacguagcccaggagag

SEQ ID NO: 239 - RNA, 22 nt, Homo sapiens
agaggcugggcccggugaaaag

SEQ ID NO: 240 - RNA, 22 nt, Homo sapiens
ugcucaauaaacacuuguugaa

SEQ ID NO: 241 - RNA, 20 nt, Homo sapiens
acaaguuuguuuuuggaggg

SEQ ID NO: 242 - RNA, 23 nt, Homo sapiens
uacaaguuaaaaugcacgggccc

SEQ ID NO: 243 - RNA, 20 nt, Homo sapiens
ccaguuaacauaguagccuc

SEQ ID NO: 244 - RNA, 22 nt, Homo sapiens
ugacuucucaguuuaauguggg

SEQ ID NO: 245 - RNA, 24 nt, Homo sapiens
cccgccugaacuguaagcacugug

SEQ ID NO: 246 - RNA, 23 nt, Homo sapiens
ccgaccaccuguccaaugcugcu

SEQ ID NO: 247 - RNA, 19 nt, Homo sapiens
ugccggggcugucagaccc

SEQ ID NO: 248 - RNA, 22 nt, Homo sapiens
ggacaagcugauacguaaccca

SEQ ID NO: 249 - RNA, 21 nt, Homo sapiens
gcaggcccaaaacccaaaaag

SEQ ID NO: 250 - RNA, 20 nt, Homo sapiens
uaguuuuuaacauuggacug

SEQ ID NO: 251 - RNA, 21 nt, Homo sapiens
ucaucuuuaucagaaagugag

SEQ ID NO: 252 - RNA, 23 nt, Homo sapiens
gugcccaugcagaucccuucccc

SEQ ID NO: 253 - RNA, 22 nt, Homo sapiens
acaaacuucagaagaaagcuga

SEQ ID NO: 254 - RNA, 23 nt, Homo sapiens
cgacugguacaagauuugggaag

SEQ ID NO: 255 - RNA, 22 nt, Homo sapiens
cgaaggcaacacgguucgcagc

SEQ ID NO: 256 - RNA, 22 nt, Homo sapiens
ucauuaguaccagguauuauua

SEQ ID NO: 257 - RNA, 23 nt, Homo sapiens
aacaaccaccuacgacaguguug

SEQ ID NO: 258 - RNA, 22 nt, Homo sapiens
agugacuuuugccagugccaug

SEQ ID NO: 259 - RNA, 23 nt, Homo sapiens
caaacaggacacauuggagcugg

SEQ ID NO: 260 - RNA, 22 nt, Homo sapiens
agaugaccccgaccuaugaaau

SEQ ID NO: 261 - RNA, 24 nt, Homo sapiens
gacccuagaaccuuccagcucagu

SEQ ID NO: 262 - RNA, 23 nt, Homo sapiens
gaaacuucaaguuugauguggau

SEQ ID NO: 263 - RNA, 18 nt, Homo sapiens
gaacuggauuccacugga

SEQ ID NO: 264 - RNA, 22 nt, Homo sapiens
auggugacagaagaagacaaga

SEQ ID NO: 265 - RNA, 22 nt, Homo sapiens
gucacccgggcugggcucuacu

SEQ ID NO: 266 - RNA, 22 nt, Homo sapiens
gguugguuuuguaguucugccu

SEQ ID NO: 267 - RNA, 21 nt, Homo sapiens
auaguacuuuguggaucauuu

SEQ ID NO: 268 - RNA, 18 nt, Homo sapiens
ccaacaacagaaacgcca

SEQ ID NO: 269 - RNA, 22 nt, Homo sapiens
ccgcgguggagaaggaggugaa

SEQ ID NO: 270 - RNA, 21 nt, Homo sapiens
gaggagagagaaaaauaaugg

SEQ ID NO: 271 - RNA, 22 nt, Homo sapiens
augcugcacugugugcagcgcg

SEQ ID NO: 272 - RNA, 22 nt, Homo sapiens
ucaccaucaaaauggaauguaa

SEQ ID NO: 273 - RNA, 22 nt, Homo sapiens
cuauuccugcugcuuucauuga

SEQ ID NO: 274 - RNA, 22 nt, Homo sapiens
ucagaccgaggcaucugcaagc

SEQ ID NO: 275 - RNA, 22 nt, Homo sapiens
agugaacuugggccacugugaa

SEQ ID NO: 276 - RNA, 22 nt, Homo sapiens
ugcucaauaaacacuuguugaa

SEQ ID NO: 277 - RNA, 22 nt, Homo sapiens
cagaaguuccauagaacggguu

SEQ ID NO: 278 - RNA, 20 nt, Homo sapiens
acauuuauaauaguguggua

SEQ ID NO: 279 - RNA, 22 nt, Homo sapiens
agccaagcucagagugcucgau

SEQ ID NO: 280 - RNA, 24 nt, Homo sapiens
gcuugaagaauauucaccugaaau

SEQ ID NO: 281 - RNA, 21 nt, Homo sapiens
uugguuuuuuuuuggcggggg

SEQ ID NO: 282 - RNA, 22 nt, Homo sapiens
gugggcuggaggcggagcugga

SEQ ID NO: 283 - RNA, 22 nt, Homo sapiens
ccaacggcauccugcagggcua

SEQ ID NO: 284 - RNA, 22 nt, Homo sapiens
ccaugaccuaaaacacugugag

SEQ ID NO: 285 - RNA, 22 nt, Homo sapiens
caaauguuggggucuacggauu

SEQ ID NO: 286 - RNA, 20 nt, Homo sapiens
uuauuuaucagagagucuga

SEQ ID NO: 287 - RNA, 22 nt, Homo sapiens
ccacaagcucagaaggaaccgu

SEQ ID NO: 288 - RNA, 22 nt, Homo sapiens
agcagggucggaauuacggguu

SEQ ID NO: 289 - RNA, 20 nt, Homo sapiens
ucaguugccacagcacugca

SEQ ID NO: 290 - RNA, 20 nt, Homo sapiens
agaguuaucacaguaccugc

SEQ ID NO: 291 - DNA, 3652 bp, Homo sapiens
ttttttttttttcctcccaacattgctgccactgtgctaatggaagcaccacggcagctttgtttgatagagatttttggctgccgtttttaaatactacccaagaagcagctcgtatttcatcaatgttgcgttgacaattggaaaagaaaagtgtaattgcgtacaggcgaaatggcagaagcaaatccccggagaggcaagatgaggttcagaaggaatgcggcttccttccctgggaacttgcacttggttttggttttacgtcctaccagctttcttcaacgaacgttcacagacattggattttggtttagtcaggaggattttatgcctaaattaccagttgttatgctgagctcagttagtgatttgctgacatacattgatgacaagcaattaacccctgagttaggcggcaccttgcagtactgccacagtgaatggatcatcttcagaaatgctatagaaaattttgccctcacagtgaaagaaatggctcagatgttacagtcctttggaactgaactggctgagacagaactaccagatgatattccctcaatagaagaaattctggcaattcgtgctgaaaggtatcatctgttgaagaatgatattacagctgtaaccaaagaaggaaaaattctgctaacaaatctggaagtgcctgacactgaaggagctgtcagttcaagactagaatgtcatcggcaaataagtggtgactggcaaactattaataagttgctgactcaagtacatgatatggaaacagcttttgatggattttgggaaaaacatcaattaaaaatggagcagtatctgcaactatggaagtttgagcaggattttcaacagcttgtgactgaagttgaatttctattaaaccaacaagcagaactggctgatgtaacagggactatagctcaagtaaaacaaaaaataaaaaaattggaaaacttagatgaaaattctcaggagctattatcaaaggcccagtttgtgatattacatggacacaagcttgcagcaaatcaccattatgcacttgatttaatctgccagaggtgcaatgagctacgttacctttctgatattttggttaatgagataaaagcaaaacggatacaactcagcaggaccttcaaaatgcataaactcctacagcaggctcgtcaatgctgtgatgaaggggaatgtcttctagctaatcaggaaatagataagtttcagtctaaagaagatgctcagaaagctctccaagacattgaaaattttcttgaaatggctctaccctttataaattatgaacctgaaacactgcagtatgaatttgatgtaatattatctcctgagcttaaggttcaaatgaagactatacaactcaagcttgaaaacattcgaagtatatttgagaaccagcaggctggtttcaggaacctggcagataagcatgtgaggccaatccaatttgtggtacccacacctgaaaatttggtcacatctgggacaccatttttttcatctaaacaagggaagaagacttggagacaaaatcagagcaacttaaaaattgaagtggtgcctgattgtcaggagaagagaagttctggtccatcctccagtttggacaatggcaatagcttggatgttttaaagaaccacgtactaaatgaactgatacagactgagagagtttatgttcgagaactgtatactgttttgttgggttatagagcggagatggataatccagagatgtttgatcttatgccacctctcctgagaaataaaaaggacattctctttggaaacatggcagaaatatatgaattccataacgacattttcttgagcagcctggaaaattgtgctcatgctccagaaagagtgggaccttgtttcctggaaaggaaggatgattttcagatgtatgcaaaatattgtcagaataagcccagatcagaaacaatttggaggaagtattcagaatgcgcatttttccaggaatgtcaaagaaagttaaaacacagacttagactggattcctatttactcaaaccagtgcaacgaatcactaaatatcagttattgttgaaggagctattaaaatatagcaaagactgtgaaggttctgctctgttgaagaaggcactcgatgcaatgctggatttactgaagtcagttaatgattctatgcatcagattgcaataaatggctatattggaaacttaaatgaactgggcaagatgataatgcaaggtggattcagcgtttggatagggcacaagaaaggtgctacaaaaatgaaggatttggctagattcaaaccaatgcagcgacaccttttcttgtatgaaaaagccattgttttttgcaaaaggcgtgttgaaagtggagaaggctctgacagatacccgtcatacagttttaaacactgttggaaaatggatgaagttggaatcactgaatatgtaaaaggtgataaccgcaagtttgaaatctggtatggtgaaaaggaagaagtttatattgtccaggcttctaatgtagatgtgaagatgacgtggctaaaagaaataagaaatattttgttgaagcagcaggaacttttgacagttaaaaaaagaaagcaacaggatcaattaacagaacgggataagtttcagatttctcttcagcagaatgatgaaaagcaacagggagcttttataagtactgaggaaactgaattggaacacaccagcactgtggtggaggtctgtgaggcaattgcgtcagttcaggcagaagcaaatacagtttggactgaggcatcacaatctgcagaaatctctgaagaacctgcggaatggtcaagcaactatttctaccctacttatgatgaaaatgaagaagaaaataggcccctcatgagacctgtgtcggagatggctctcctatattgatgaagctactatgtcaaatggcaagtagctctttcctgcctgcttctcagctcatttggaaaaatactgcgcaaaagacattgagctcaaatgatgcagatgttgttttcaggttaatggacacgcaaagaaaccacagcacatacttcttttctttcatttaataaagcttttaattatggtacgctgtctttttaaaatcatgtatttaatgtgtcagatattgtgcttgaaagattctcatctcagaatacttttggacttgaaaattatttcttctctactttgtaaccaaatgcaatcggtgtgccttggattatttagtttattaatgaattaagtcaaaattacggctgcaaaatggctaaggtcaagtaaagcacaacattatgatttaatatgcttttgttgaaaccacagcttttgtgcccattgttttaacttgtgtgaaacaatacaaagcccagaaattcttttcggggcatgagtaaattttgttcagggctactgtctgtatgtgcccagataaaattttcatgagagtagtttacaaaagccgtatttaaaagttaatattttcacactttttttctggatttctgcttataattaatgtaacttaaattagttgtgctctgctattttctgtatatttcatgttgtaattctttttttcaaataaaaattaattcttcaggtt

SEQ ID NO: 292 - DNA, 2745 bp, Homo sapiens
acctccctccgcggagcagccagacagcgagggccccggccgggggcaggggggacgccccgtccggggcaccccccccggctctgagccgcccgcggggccggcctcggcccggagcggaggaaggagtcgccgaggagcagcctgaggccccagagtctgagacgagccgccgccgcccccgccactgcggggaggagggggaggaggagcgggaggagggacgagctggtcgggagaagaggaaaaaaacttttgagacttttccgttgccgctgggagccggaggcgcggggacctcttggcgcgacgctgccccgcgaggaggcaggacttggggaccccagaccgcctccctttgccgccggggacgcttgctccctccctgccccctacacggcgtccctcaggcgcccccattccggaccagccctcgggagtcgccgacccggcctcccgcaaagacttttccccagacctcgggcgcaccccctgcacgccgccttcatccccggcctgtctcctgagcccccgcgcatcctagaccctttctcctccaggagacggatctctctccgacctgccacagatcccctattcaagaccacccaccttctggtaccagatcgcgcccatctaggttatttccgtgggatactgagacacccccggtccaagcctcccctccaccactgcgcccttctccctgaggagcctcagctttccctcgaggccctcctaccttttgccgggagacccccagcccctgcaggggcggggcctccccaccacaccagccctgttcgcgctctcggcagtgccggggggcgccgcctcccccatgccgccctccgggctgcggctgctgccgctgctgctaccgctgctgtggctactggtgctgacgcctggcccgccggccgcgggactatccacctgcaagactatcgacatggagctggtgaagcggaagcgcatcgaggccatccgcggccagatcctgtccaagctgcggctcgccagccccccgagccagggggaggtgccgcccggcccgctgcccgaggccgtgctcgccctgtacaacagcacccgcgaccgggtggccggggagagtgcagaaccggagcccgagcctgaggccgactactacgccaaggaggtcacccgcgtgctaatggtggaaacccacaacgaaatctatgacaagttcaagcagagtacacacagcatatatatgttcttcaacacatcagagctccgagaagcggtacctgaacccgtgttgctctcccgggcagagctgcgtctgctgaggaggctcaagttaaaagtggagcagcacgtggagctgtaccagaaatacagcaacaattcctggcgatacctcagcaaccggctgctggcacccagcgactcgccagagtggttatcttttgatgtcaccggagttgtgcggcagtggttgagccgtggaggggaaattgagggctttcgccttagcgcccactgctcctgtgacagcagggataacacactgcaagtggacatcaacgggttcactaccggccgccgaggtgacctggccaccattcatggcatgaaccggcctttcctgcttctcatggccaccccgctggagagggcccagcatctgcaaagctcccggcaccgccgagccctggacaccaactattgcttcagctccacggagaagaactgctgcgtgcggcagctgtacattgacttccgcaaggacctcggctggaagtggatccacgagcccaagggctaccatgccaacttctgcctcgggccctgcccctacatttggagcctggacacgcagtacagcaaggtcctggccctgtacaaccagcataacccgggcgcctcggcggcgccgtgctgcgtgccgcaggcgctggagccgctgcccatcgtgtactacgtgggccgcaagcccaaggtggagcagctgtccaacatgatcgtgcgctcctgcaagtgcagctgaggtcccgccccgccccgccccgccccggcaggcccggccccaccccgccccgcccccgctgccttgcccatgggggctgtatttaaggacaccgtgccccaagcccacctggggccccattaaagatggagagaggactgcggatctctgtgtcattgggcgcctgcctggggtctccatccctgacgttcccccactcccactccctctctctccctctctgcctcctcctgcctgtctgcactattcctttgcccggcatcaaggcacaggggaccagtggggaacactactgtagttagatctatttattgagcaccttgggcactgttgaagtgccttacattaatgaactcattcagtcaccatagcaacactctgagatggcagggactctgataacacccattttaaaggttgaggaaacaagcccagagaggttaagggaggagttcctgcccaccaggaacctgctttagtgggggatagtgaagaagacaataaaagatagtagttcaggccaggcggggtgctcacgcctgtaatcctagcacttttgggaggcagagatgggaggatacttgaatccaggcatttgagaccagcctgggtaacatagtgagaccctatctctacaaaacacttttaaaaaatgtacacctgtggtcccagctactctggaggctaaggtgggaggatcacttgatcctgggaggtcaaggctgcag

SEQ ID NO: 293 - DNA, 4119 bp, Homo sapiens
ctggagagcctgctgcccgcccgcccgtaaaatggtcccctcggctggacagctcgccctgttcgctctgggtattgtgttggctgcgtgccaggccttggagaacagcacgtccccgctgagtgcagacccgcccgtggctgcagcagtggtgtcccattttaatgactgcccagattcccacactcagttctgcttccatggaacctgcaggtttttggtgcaggaggacaagccagcatgtgtctgccattctgggtacgttggtgcacgctgtgagcatgcggacctcctggccgtggtggctgccagccagaagaagcaggccatcaccgccttggtggtggtctccatcgtggccctggctgtccttatcatcacatgtgtgctgatacactgctgccaggtccgaaaacactgtgagtggtgccgggccctcatctgccggcacgagaagcccagcgccctcctgaagggaagaaccgcttgctgccactcagaaacagtggtctgaagagcccagaggaggagtttggccaggtggactgtggcagatcaataaagaaaggcttcttcaggacagcactgccagagatgcctgggtgtgccacagaccttcctacttggcctgtaatcacctgtgcagccttttgtgggccttcaaaactctgtcaagaactccgtctgcttggggttattcagtgtgacctagagaagaaatcagcggaccacgatttcaagacttgttaaaaaagaactgcaaagagacggactcctgttcacctaggtgaggtgtgtgcagcagttggtgtctgagtccacatgtgtgcagttgtcttctgccagccatggattccaggctatatatttctttttaatgggccacctccccacaacagaattctgcccaacacaggagatttctatagttattgttttctgtcatttgcctactggggaagaaagtgaaggaggggaaactgtttaatatcacatgaagaccctagctttaagagaagctgtatcctctaaccacgagactctcaaccagcccaacatcttccatggacacatgacattgaagaccatcccaagctatcgccacccttggagatgatgtcttatttattagatggataatggttttatttttaatctcttaagtcaatgtaaaaagtataaaaccccttcagacttctacattaatgatgtatgtgttgctgactgaaaagctatactgattagaaatgtctggcctcttcaagacagctaaggcttgggaaaagtcttccagggtgcggagatggaaccagaggctgggttactggtaggaataaaggtaggggttcagaaatggtgccattgaagccacaaagccggtaaatgcctcaatacgttctgggagaaaacttagcaaatccatcagcagggatctgtcccctctgttggggagagaggaagagtgtgtgtgtctacacaggataaacccaatacatattgtactgctcagtgattaaatgggttcacttcctcgtgagccctcggtaagtatgtttagaaatagaacattagccacgagccataggcatttcaggccaaatccatgaaagggggaccagtcatttattttccattttgttgcttggttggtttgttgctttatttttaaaaggagaagtttaactttgctatttattttcgagcactaggaaaactattccagtaatttttttttcctcatttccattcaggatgccggctttattaacaaaaactctaacaagtcacctccactatgtgggtcttcctttcccctcaagagaaggagcaattgttcccctgacatctgggtccatctgacccatggggcctgcctgtgagaaacagtgggtcccttcaaatacatagtggatagctcatccctaggaattttcattaaaatttggaaacagagtaatgaagaaataatatataaactccttatgtgaggaaatgctactaatatctgaaaagtgaaagatttctatgtattaactcttaagtgcacctagcttattacatcgtgaaaggtacatttaaaatatgttaaattggcttgaaattttcagagaattttgtcttcccctaattcttcttccttggtctggaagaacaatttctatgaattttctctttattttttttttataattcagacaattctatgacccgtgtcttcatttttggcactcttatttaacaatgccacacctgaagcacttggatctgttcagagctgaccccctagcaacgtagttgacacagctccaggtttttaaattactaaaataagttcaagtttacatcccttgggccagatatgtgggttgaggcttgactgtagcatcctgcttagagaccaatcaatggacactggtttttagacctctatcaatcagtagttagcatccaagagactttgcagaggcgtaggaatgaggctggacagatggcggaacgagaggttccctgcgaagacttgagatttagtgtctgtgaatgttctagttcctaggtccagcaagtcacacctgccagtgccctcatccttatgcctgtaacacacatgcagtgagaggcctcacatatacgcctccctagaagtgccttccaagtcagtcctttggaaaccagcaggtctgaaaaagaggctgcatcaatgcaagcctggttggaccattgtccatgcctcaggatagaacagcctggcttatttggggatttttcttctagaaatcaaatgactgataagcattggctccctctgccatttaatggcaatggtagtctttggttagctgcaaaaatactccatttcaagttaaaaatgcatcttctaatccatctctgcaagctccctgtgtttccttgccctttagaaaatgaattgttcactacaattagagaatcatttaacatcctgacctggtaagctgccacacacctggcagtggggagcatcgctgtttccaatggctcaggagacaatgaaaagcccccatttaaaaaaataacaaacattttttaaaaggcctccaatactcttatggagcctggatttttcccactgctctacaggctgtgactttttttaagcatcctgacaggaaatgttttcttctacatggaaagatagacagcagccaaccctgatctggaagacagggccccggctggacacacgtggaaccaagccagggatgggctggccattgtgtccccgcaggagagatgggcagaatggccctagagttcttttccctgagaaaggagaaaaagatgggattgccactcacccacccacactggtaagggaggagaatttgtgcttctggagcttctcaagggattgtgttttgcaggtacagaaaactgcctgttatcttcaagccaggttttcgagggcacatgggtcaccagttgctttttcagtcaatttggccgggatggactaatgaggctctaacactgctcaggagacccctgccctctagttggttctgggctttgatctcttccaacctgcccagtcacagaaggaggaatgactcaaatgcccaaaaccaagaacacattgcagaagtaagacaaacatgtatatttttaaatgttctaacataagacctgttctctctagccattgatttaccaggctttctgaaagatctagtggttcacacagagagagagagagtactgaaaaagcaactcctcttcttagtcttaataatttactaaaatggtcaacttttcattatctttattataataaacctgatgcttttttttagaactccttactctgatgtctgtatatgttgcactgaaaaggttaatatttaatgttttaatttattttgtgtggtaagttaattttgatttctgtaatgtgttaatgtgattagcagttattttccttaatatctgaattatacttaaagagtagtgagcaatataagacgcaattgtgtttttcagtaatgtgcattgttattgagttgtactgtaccttatttggaaggatgaaggaatgaacctttttttcctaaaaaaaaaaaaaaaaaaaaaaaaaaaaaaaaa

SEQ ID NO: 294 - DNA, 3225 bp, Homo sapiens
ggcggcagcgccctgccgacgccggggagggacgcaggcaggcggcgggcagcgggaggcggcaccccggtgctccccgcggctctcggcggagccccgccgcccgccgcgccatggcccgaagaccccggcacagcatatatagcagtgacgaggatgatgaggactttgagatgtgtgaccatgactatgatgggctgcttcccaagtctggaaagcgtcacttggggaaaacaaggtggacccgggaagaggatgaaaaactgaagaagctggtggaacagaatggaacagatgactggaaagttattgccaattatctcccgaatcgaacagatgtgcagtgccagcaccgatggcagaaagtactaaaccctgagctcatcaagggtccttggaccaaagaagaagatcagagagtgatagagcttgtacagaaatacggtccgaaacgttggtctgttattgccaagcacttaaaggggagaattggaaaacaatgtagggagaggtggcataaccacttgaatccagaagttaagaaaacctcctggacagaagaggaagacagaattatttaccaggcacacaagagactggggaacagatgggcagaaatcgcaaagctactgcctggacgaactgataatgctatcaagaaccactggaattctacaatgcgtcggaaggtcgaacaggaaggttatctgcaggagtcttcaaaagccagccagccagcagtggccacaagcttccagaagaacagtcatttgatgggttttgctcaggctccgcctacagctcaactccctgccactggccagcccactgttaacaacgactattcctattaccacatttctgaagcacaaaatgtctccagtcatgttccataccctgtagcgttacatgtaaatatagtcaatgtccctcagccagctgccgcagccattcagagacactataatgatgaagaccctgagaaggaaaagcgaataaaggaattagaattgctcctaatgtcaaccgagaatgagctaaaaggacagcaggtgctaccaacacagaaccacacatgcagctaccccgggtggcacagcaccaccattgccgaccacaccagacctcatggagacagtgcacctgtttcctgtttgggagaacaccactccactccatctctgccagcggatcctggctccctacctgaagaaagcgcctcgccagcaaggtgcatgatcgtccaccagggcaccattctggataatgttaagaacctcttagaatttgcagaaacactccaatttatagattctttcttaaacacttccagtaaccatgaaaactcagacttggaaatgccttctttaacttccacccccctcattggtcacaaattgactgttacaacaccatttcatagagaccagactgtgaaaactcaaaaggaaaatactgtttttagaaccccagctatcaaaaggtcaatcttagaaagctctccaagaactcctacaccattcaaacatgcacttgcagctcaagaaattaaatacggtcccctgaagatgctacctcagacaccctctcatctagtagaagatctgcaggatgtgatcaaacaggaatctgatgaatctggatttgttgctgagtttcaagaaaatggaccacccttactgaagaaaatcaaacaagaggtggaatctccaactgataaatcaggaaacttcttctgctcacaccactgggaaggggacagtctgaatacccaactgttcacgcagacctcgcctgtgcgagatgcaccgaatattcttacaagctccgttttaatggcaccagcatcagaagatgaagacaatgttctcaaagcatttacagtacctaaaaacaggtccctggcgagccccttgcagccttgtagcagtacctgggaacctgcatcctgtggaaagatggaggagcagatgacatcttccagtcaagctcgtaaatacgtgaatgcattctcagcccggacgctggtcatgtgagacatttccagaaaagcattatggttttcagaacagttcaagttgacttgggatatatcattcctcaacatgaaacttttcatgaatgggagaagaacctatttttgttgtggtacaacagttgagagcacgaccaagtgcatttagttgaatgaagtcttcttggatttcacccaactaaaaggatttttaaaaataaataacagtcttacctaaattattaggtaatgaattgtagccagttgttaatatcttaatgcagatttttttaaaaaaaaacataaaatgatttatctggtattttaaaggatccaacagatcagtattttttcctgtgatgggttttttgaaatttgacacattaaaaggtactccagtatttcacttttctcgatcactaaacatatgcatatatttttaaaaatcagtaaaagcattactctaagtgtagacttaataccatgtgacatttaatccagattgtaaatgctcatttatggttaatgacattgaaggtacatttattgtaccaaaccattttatgagttttctgttagcttgctttaaaaattattactgtaagaaatagttttataaaaaattatatttttattcagtaatttaattttgtaaatgccaaatgaaaaacgttttttgctgctatggtcttagcctgtagacatgctgctagtatcagaggggcagtagagcttggacagaaagaaaagaaacttggtgttaggtaattgactatgcactagtatttcagactttttaattttatatatatatacattttttttccttctgcaatacatttgaaaacttgtttgggagactctgcattttttattgtggtttttttgttattgttggtttatacaagcatgcgttgcacttcttttttgggagatgtgtgttgttcatgttctatgttttgttttgtgtgtagcctgactgttttataatttgggagttctcgatttgatccgcatcccctgtggtttctaagtgtatggtctcagaactgttgcatggatcctgtgtttgcaactggggagacagaaactgtggttgatagccagtcactgccttaagaacatttgatgcaagatggccagcactgaacttttgagatatgacggtgtacttactgccttgtagcaaaataaagatgtgcccttatttt

SEQ ID NO: 295 - DNA, 3090 bp, Homo sapiens
gaattccgggcccggatagccggcggcggcggcggcggcggcggcggcggcggccgggagaggcccctccttcacgccctgcttctctccctcgctcgcagtcgagccgagccggcggacccgcctgggctccgaccctgcccaggccatggccggcaacgtgaagaagagctctggggccgggggcggcacgggctccgggggctcgggttcgggtggcctgattgggctcatgaaggacgccttccagccgcaccaccaccaccaccaccacctcagcccccacccgccggggacggtggacaagaagatggtggagaagtgctggaagctcatggacaaggtggtgcggttgtgtcagaacccaaagctggcgctaaagaatagcccaccttatatcttagacctgctaccagatacctaccagcatctccgtactatcttgtcaagatatgaggggaagatggagacacttggagaaaatgagtattttagggtgtttatggagaatttgatgaagaaaactaagcaaaccataagcctcttcaaggagggaaaagaaagaatgtatgaggagaattctcagcctaggcgaaacctaaccaaactgtccctcatcttcagccacatgctggcagaactaaaaggaatctttccaagtggactctttcagggagacacatttcggattactaaagcagatgctgcggaattttggagaaaagcttttggggaaaagacaatagtcccttggaagagctttcgacaggctctacatgaagtgcatcccatcagttctgggctggaggccatggctctgaaatccactattgatctgacctgcaatgattatatttcggtttttgaatttgacatctttacccgactctttcagccctggtcctctttgctcaggaattggaacagccttgctgtaactcatcctggctacatggcttttttgacgtatgacgaagtgaaagctcggctccagaaattcattcacaaacctggcagttatatcttccggctgagctgtactcgtctgggtcagtgggctattgggtatgttactgctgatgggaacattctccagacaatccctcacaataaacctctcttccaagcactgattgatggcttcagggaaggcttctatttgtttcctgatggacgaaatcagaatcctgatctgactggcttatgtgaaccaactccccaagaccatatcaaagtgacccaggaacaatatgaattatactgtgagatgggctccacattccaactatgtaaaatatgtgctgaaaatgataaggatgtaaagattgagccctgtggacacctcatgtgcacatcctgtcttacatcctggcaggaatcagaaggtcagggctgtcctttctgccgatgtgaaattaaaggtactgaacccatcgtggtagatccgtttgatcctagagggagtggcagcctgttgaggcaaggagcagagggagctccctccccaaattatgatgatgatgatgatgaacgagctgatgatactctcttcatgatgaaggaattggctggtgccaaggtggaacggccgccttctccattctccatggccccacaagcttcccttcccccggtgccaccacgacttgaccttctgccgcagcgagtatgtgttccctcaagtgcttctgctcttggaactgcttctaaggctgcttctggctcccttcataaagacaaaccattgccagtacctcccacacttcgagatcttccaccaccaccgcctccagaccggccatattctgttggagcagaatcccgacctcaaagacgccccttgccttgtacaccaggcgactgtccctccagagacaaactgccccctgtcccctctagccgccttggagactcatggctgccccggccaatccccaaagtaccagtatctgccccaagttccagtgatccctggacaggaagagaattaaccaaccggcactcacttccattttcattgccctcacaaatggagcccagaccagatgtgcctaggctcggaagcacgttcagtctggatacctccatgagtatgaatagcagcccattagtaggtccagagtgtgaccaccccaaaatcaaaccttcctcatctgccaatgccatttattctctggctgccagacctcttcctgtgccaaaactgccacctggggagcaatgtgagggtgaagaggacacagagtacatgactccctcttccaggcctctacggcctttggatacatcccagagttcacgagcatgtgattgcgaccagcagattgatagctgtacgtatgaagcaatgtataatattcagtcccaggcgccatctatcaccgagagcagcacctttggtgaagggaatttggccgcagcccatgccaacactggtcccgaggagtcagaaaatgaggatgatgggtatgatgtcccaaagccacctgtgccggccgtgctggcccgccgaactctctcagatatctctaatgccagctcctcctttggctggttgtctctggatggtgatcctacaacaaatgtcactgaaggttcccaagttcccgagaggcctccaaaaccattcccgcggagaatcaactctgaacggaaagctggcagctgtcagcaaggtagtggtcctgccgcctctgctgccaccgcctcacctcagctctccagtgagatcgagaacctcatgagtcaggggtactcctaccaggacatccagaaagctttggtcattgcccagaacaacatcgagatggccaaaaacatcctccgggaatttgtttccatttcttctcctgcccatgtagctacctagcacaccatctccctgctgcaggtttagaggaccagtgagttgggagttattactcaagtggcacctagaagggcaggagttcctttggtgacttcacagtgaagtcttgccctctctgtgggatatcacatcagtggttccaagatttcaaagtggtgaaatgaaaatggagcagctagtatgttttattattttatgggtcttgagtgcatttgaaggtg

SEQ ID NO: 296 - DNA, 3493 bp, Homo sapiens
ccgctcaactaaaaaactgaatgggatgggagatgatggcagccccccagcgaaaaaaatgataacggacattcatgcaaatggaaaaacgataaacaaggtgccaacagttaagaaggaacacttggatgactatggagaagcaccagtggaaactgatggagagcatgttaagcgaacctgtacttctgttcctgaaactttgcatttaaatcccagtttgaaacacacattggcacaattccatttaagtagtcagagctcgctgggtggaccagcagcattttctgctcggcattcccaagaaagcatgtcgcctactgtatttctgcctcttccatcacctcaggttcttcctggcccattgctcatcccttcagatagctccacagaactcactcagactgtgttggaaggggaatctatttcttgttttcaagttggaggagaaaagagactctgtttgccccaagtcttaaattctgttctccgagaatttacactccagcaaataaatacagtgtgtgatgaactgtacatatattgttcaaggtgtacttcagaccagcttcatatcttaaaggtactgggcatacttccattcaatgccccatcctgtgggctgattacattaactgatgcacaaagattatgtaatgctttattgcggccacgaacttttcctcaaaatggtagcgtacttcctgctaaaagctcattggcccagttaaaggaaactggcagtgcctttgaagtggagcatgaatgcctaggcaaatgtcagggtttatttgcaccccagttttatgttcagcctgatgctccgtgtattcaatgtctggagtgttgtggaatgtttgcaccccagacgtttgtgatgcattctcacagatcacctgacaaaagaacttgccactggggctttgaatcagctaaatggcattgctatcttcatgtgaaccaaaaatacttaggaacacctgaagaaaagaaactgaagataattttagaagaaatgaaggagaagtttagcatgagaagtggaaagagaaatcaatccaagacagatgcaccatcaggaatggaattacagtcatggtatcctgttataaagcaggaaggtgaccatgtttctcagacacattcatttttacaccctagctaatttattttaaaataagtatagctctctgaagtaatttcatacatagtatcttataagagaacatgaaaaacatttattatcccataaaatccatggggtaataatgtcaattaatgatagtttcaggaaactccctttaaaaacagatctaagaattttacctaatatattttgagccaagaattaacaaatatgaaatttgccattagagaatgacagacttttctgtgcaaaaaaagtgcagaagatgttgtccctcctgaaactatggaattcctttatcttctaaaacttatctaaaaatcttttagtagcaggtaactaaactgtcctatatgcacctatcatgtactatcagttgactgtaaattcctgattttgatattaagtagtaaatgaaaatggtccattcgtgcaaattttggtaagacaacatttaaacatacagaagtccaaaataaccttcaaggtgtttaacattttacaacttaaaggaaaacaagtccattatataaattttagtaagactcataactacatgtaaaaactgtacaggaggattatggattgtatagaaactgatacacaacagtggtatcagtttttctcaagaacgttaatattttcacaccactattaacatcacaaacaaaagttcagaaattatcacattttatttttgaaaagttgctgcttaaaaaaaaatctaactataaccacatttaaactgaaaaacaaattacaactgctgcttctgtttagcagcagcacataacaacacattcttcttccccactgtgctcatggggtatgctataacctcagtaaaattcctcctagggtacacattaaaaagaagagaactggtggaaattcattccacaatctgaacaaagtaaaagtaaatttggtgtatgttaatgagtacaccatatcaacttagaaaaattgtgttaatgagaaaaggggagattcaactccttgagtagctctatatacttaaaatataaagccaccattgtatctaaaattgagtctgaaatatggataacaaaattgaccacagctattttccaacacatattgcagcttttaaaagtacacaattgttaagtttgcattagaaatataagcagattacctactaggttgaaaccatatagtattgttactaagctgatttttttaaaaaagtacaaagaaacatacattttcattcatttggaaaatgtaaaaatttaagtactaatatataatctcttcactttctctgatctacaaatggatagaatgcctagttatcgtcatgcagatagattcttcagaattccgtgtgtgataaagtggttgccccaaatgtgtcacttacttctgctgtatcccagtctaaagagctcacaaagacagaggcaagtaagtccatatcaagacagtcagagaaggctcacagtagtggtaaacttcaaaaaacagtgtcttatccagatgtctcacttgaggaacaggagaaaatggatttaaaaacaagtagagaattatgtagccgtttagatgcatcaatctcaaaaaattctacaagtaaaaggaaatctgagtctgccacttgcaacttagtcagagacataaacaaagtgggaattggccttgttgctgccgcttcatctccgcttcttgtgaaagatgtcatttgtgaggatgataagggaaaaatcatggaagaagtaatgagaacttatttaaaacaacaggaaaaactaaacttgattttgcaaaagaagcaacaacttcagatggaagtaaaaatgttgagtagttcaaaatctatgaaggaactcactgaagaacagcagaatttacagaaagagcttgaatctttgcagaatgaacatgctcaaagaatggaagaattttatgttgaacagaaagacttagagaaaaaattggagcagataatgaagcaaaaatgtacctgtgactcaaatttagaaaaagacaaagaggctgaatatgcaggacagttggcagaactgaggcagagattggaccatgctgaggccgataggcaagaactccaagatgaactcagacaggaacgggaagcaagacagaagttagagatgatgataaaagagctaaagctgcaaattctgaaatcatcaaagactgctaaagaatagaaactgttaaagagattcatctgtgtattactgacaaggttttttttgtttgttgcttgctttggtaattgaatttgaatcatggtccatagctgtttcctgtgtgaattgttatcgctcacattcacacacatacgagcgagctaagtgt

SEQ ID NO: 297 - DNA, 2459 bp, Homo sapiens
gggtcaagcacagctatccatcagatgatctactttcagccttcctgagtcccagacaatagaagacaggtggctgtacccttggccaagggtaggtgtggcagtggtgtctgctgtcactgtgccctcattggcccccagcaatcagactcaacagacggagcaactgccatccgaggctcctgaaccagggccattcaccaggagcatgcggctccctgatgtccagctctggctggtgctgctgtgggcactggtgcgagcacaggggacagggtctgtgtgtccctcctgtgggggctccaaactggcaccccaagcagaacgagctctggtgctggagctagccaagcagcaaatcctggatgggttgcacctgaccagtcgtcccagaataactcatcctccaccccaggcagcgctgaccagagccctccggagactacagccagggagtgtggctccagggaatggggaggaggtcatcagctttgctactgtcacagactccacttcagcctacagctccctgctcacttttcacctgtccactcctcggtcccaccacctgtaccatgcccgcctgtggctgcacgtgctccccacccttcctggcactctttgcttgaggatcttccgatggggaccaaggaggaggcgccaagggtcccgcactctcctggctgagcaccacatcaccaacctgggctggcataccttaactctgccctctagtggcttgaggggtgagaagtctggtgtcctgaaactgcaactagactgcagacccctagaaggcaacagcacagttactggacaaccgaggcggctcttggacacagcaggacaccagcagcccttcctagagcttaagatccgagccaatgagcctggagcaggccgggccaggaggaggacccccacctgtgagcctgcgacccccttatgttgcaggcgagaccattacgtagacttccaggaactgggatggcgggactggatactgcagcccgaggggtaccagctgaattactgcagtgggcagtgccctccccacctggctggcagcccaggcattgctgcctctttccattctgccgtcttcagcctcctcaaagccaacaatccttggcctgccagtacctcctgttgtgtccctactgcccgaaggcccctctctctcctctacctggatcataatggcaatgtggtcaagacggatgtgccagatatggtggtggaggcctgtggctgcagctagcaagcaggacctggggctttggagtgaagagaccaagatgaagtttcccaggcacagggcatctgtgactggaggcatcagattcctgatccacaccccaacccaacaaccacctggcaatatgactcacttgacccctatgggacccaaatgggcactttcttgtctgagactctggcttattccaggttggctgatgtgttgggagatgggtaaagcgtttcttctaaaggggtctactcagaaagcatgatttcctgccctaagtcctgtgagaagatgtcagggactagggagggagggagggaaggcagagaaaaattacttagcctctcccaagatgagaaagtcctcaagtgaggggaggaggaagcagatagatggtccagcaggcttgaagcagggtaagcaggctggcccagggtaagggctgttgaggtaccttaagggaaggtcaagagggagatgggcaaggcgctgagggaggatgcttaggggacccccagaaacaggagtcaggaaaatgaggcactaagcctaagaagttccctggtttttcccaggggacaggacccactgggcgacaagcatttatactttctttcttcttttttatttttttgagatcgagtctcgctctgtcaccaggctggagtgcagtgacacgatcttggctcactgcaacctccgtctcctgggttcaagtgattcttctgcctcagcctcccgagcagctgggattacaggcgcccactaatttttgtattcttagtagaaacgaggtttcaacatgttggccaggatggtctcaatctcttgacctcttgatccacccgacttggcctcccgaagtgatgagattataggcgtgagccaccgcgcctggcttatactttcttaataaaaaggagaaagaaaatcaacaaatgtgagtcataaagaagggttagggtgatggtccagagcaacagttcttcaagtgtactctgtaggcttctgggaggtcccttttcaggggtgtccacaaagtcaaagctattttcataataatactaacatgttatttgccttttgaattctcattatcttaaaattgtattgtggagttttccaaaggccgtgtgacatgtgattacatcatctttctgacatcaaaaaaaaaaaaaaaaaaaaaaaaaaaaaaaaaaaaaaaaaaaaa

SEQ ID NO: 298 - DNA, 1427 bp, Homo sapiens
cctctcgctgccgtccaggtgcaccgcctgcctctcagcaggatggacgtgatggatggctgccagttctcaccttctgagtacttctacgacggctcctgcataccgtcccccgagggtgaatttggggacgagtttgtgccgcgagtggctgccttcggagcgcacaaagcagagctgcagggctcagatgaggacgagcacgtgcgagcgcctaccggccaccaccaggctggtcactgcctcatgtgggcctgcaaagcctgcaagaggaagtccaccaccatggatcggcggaaggcagccactatgcgcgagcggaggcgcctgaagaaggtcaaccaggctttcgaaaccctcaagaggtgtaccacgaccaaccccaaccagaggctgcccaaggtggagatcctcaggaatgccatccgctacatcgagagcctgcaggagttgctgagagagcaggtggagaactactatagcctgccgggacagagctgctcggagcccaccagccccacctccaactgctctgatggcatgcccgaatgtaacagtcctgtctggtccagaaagagcagtacttttgacagcatctactgtcctgatgtatcaaatgtatatgccacagataaaaactccttatccagcttggattgcttatccaacatagtggaccggatcacctcctcagagcaacctgggttgcctctccaggatctggcttctctctctccagttgccagcaccgattcacagcctcgaactccaggggcttctagttccaggcttatctatcatgtgctatgaactaattttctggtctatatgacttcttccaggagggcctaatacacaggacgaagaaggcttcaaaaagtcccaaaccaagacaacatgtacataaagatttcttttcagttgtaaatttgtaaagattaccttgccactttataagaaagtgtatttaactaaaaagtcatcattgcaaataatactttcttcttctttattattctttgcttagatattaatacatagttccagtaatactatttctgatagggggccattgattgagggtagcttgttcgaatgcttaacttatatatacatatatatatattataaatattgctcatcaaaatgtctctggtgtttagagctttatttttttctttaaaacattaaaacagctgagaatcagttaaatggaattttaaatatatttaactatttcttttctctttaatcctttagttatattgtattaaataaaaatataatactgcctaatgtatatattttgatcttttcttgtaagaaatgtatcttttaaatgtaagcacaaaatagtactttgtggatcatttcaagatataagaaattttggaaattccaccataaataaaattttttactacaag

SEQ ID NO: 299 - DNA, 1420 bp, Homo sapiens
tgaaacagcagattacttttatttatgcatttaatggattgaagaaaagaacctttttttttctctctctctctgcaactgcagtaagggaggggagttggatatacctcgcctaatatctcctgggttgacaccatcattattgtttattcttgtgctccaaaagccgagtcctctgatggctcccttaggtgaagttgggaactatttcggtgtgcaggatgcggtaccgtttgggaatgtgcccgtgttgccggtggacagcccggttttgttaagtgaccacctgggtcagtccgaagcaggggggctccccaggggacccgcagtcacggacttggatcatttaaaggggattctcaggcggaggcagctatactgcaggactggatttcacttagaaatcttccccaatggtactatccagggaaccaggaaagaccacagccgatttggcattctggaatttatcagtatagcagtgggcctggtcagcattcgaggcgtggacagtggactctacctcgggatgaatgagaagggggagctgtatggatcagaaaaactaacccaagagtgtgtattcagagaacagttcgaagaaaactggtataatacgtactcgtcaaacctatataagcacgtggacactggaaggcgatactatgttgcattaaataaagatgggaccccgagagaagggactaggactaaacggcaccagaaattcacacattttttacctagaccagtggaccccgacaaagtacctgaactgtataaggatattctaagccaaagttgacaaagacaatttcttcacttgagcccttaaaaaagtaaccactataaaggtttcacgcggtgggttcttattgattcgctgtgtcatcacatcagctccactgttgccaaactttgtcgcatgcataatgtatgatggaggcttggatgggaatatgctgattttgttctgcacttaaaggcttctcctcctggagggctgcctagggccacttgcttgatttatcatgagagaagaggagagagagagagactgagcgctaggagtgtgtgtatgtgtgtgtgtgtgtgtgtgtgtgtgtgtgtatgtgtgtagcgggagatgtgggcggagcgagagcaaaaggactgcggcctgatgcatgctggaaaaaagacacgcttttcatttctgatcagttgtacttcatcctatatcagcacagctgccatacttcgacttatcaggattctggctggtggcctgcgcgagggtgcagtcttacttaaaagactttcagttaattctcactggtatcatcgcagtgaacttaaagcaaagacctcttagtaaaaaataaaaaaaaataaaaaataaaaataaaaaaagttaaatttatttatagaaattccaaaa

SEQ ID NO: 300 - DNA, 4541 bp, Homo sapiens
ggatcctctagggtcccagctcgcctcgatggagctcctcccgccgctgcctcagtccttcctgttgctgctgctgttgcctgccaagcccgcggcgggcgaggactggcagtgcccgcgcaccccctacgcggcctctcgcgactttgacgtgaagtacgtggtgcccagcttctccgccggaggcctggtacaggccatggtgacctacgagggcgacagaaatgagagtgctgtgtttgtagccatacgcaatcgcctgcatgtgcttgggcctgacctgaagtctgtccagagcctggccacgggccctgctggagaccctggctgccagacgtgtgcagcctgtggcccaggaccccacggccctcccggtgacacagacacaaaggtgctggtgctggatcccgcgctgcctgcgctggtcagttgtggctccagcctgcagggccgctgcttcctgcatgacctagagccccaagggacagccgtgcatctggcagcgccagcctgcctcttctcagcccaccataaccggcccgatgactgccccgactgtgtggccagcccattgggcacccgtgtaactgtggttgagcaaggccaggcctcctatttctacgtggcatcctcactggacgcagccgtggctggcagcttcagcccacgctcagtgtctatcaggcgtctcaaggctgacgcctcgggattcgcaccgggctttgtggcgttgtcagtgctgcccaagcatcttgtctcctacagtattgaatacgtgcacagcttccacacgggagccttcgtatacttcctgactgtacagccggccagcgtgacagatgatcctagtgccctgcacacacgcctggcacggcttagcgccactgagccagagttgggtgactatcgggagctggtcctcgactgcagatttgctccaaaacgcaggcgccggggggccccagaaggcggacagccctaccctgtgctgcaggtggcccactccgctccagtgggtgcccaacttgccactgagctgagcatcgccgagggccaggaagtactatttggggtctttgtgactggcaaggatggtggtcctggcgtgggccccaactctgtcgtctgtgccttccccattgacctgctggacacactaattgatgagggtgtggagcgctgttgtgaatccccagtccatccaggcctccggcgaggcctcgacttcttccagtcgcccagtttttgccccaacccgcctggcctggaagccctcagccccaacaccagctgccgccacttccctctgctggtcagtagcagcttctcacgtgtggacctattcaatgggctgttgggaccagtacaggtcactgcattgtatgtgacacgccttgacaacgtcacagtggcacacatgggcacaatggatgggcgtatcctgcaggtggagctggtcaggtcactaaactacttgctgtatgtgtccaacttctcactgggtgacagtgggcagcccgtgcagcgggatgtcagtcgtcttggggaccacctactctttgcctctggggaccaggttttccaggtacctatccgaggccctggctgccgccacttcctgacctgtgggcgttgcctaagggcatggcatttcatgggctgtggctggtgtgggaacatgtgcggccagcagaaggagtgtcctggctcctggcaacaggaccactgcccacctaagcttactgagttccacccccacagtggacctctaaggggcagtacaaggctgaccctgtgtggctccaacttctaccttcacccttctggtctggtgcctgagggaacccatcaggtcactgtgggccaaagtccctgccggccactgcccaaggacagctcaaaactcagaccagtgccccggaaagactttgtagaggagtttgagtgtgaactggagcccttgggcacccaggcagtggggcctaccaacgtcagcctcaccgtgactaacatgccaccgggcaagcacttccgggtagacggcacctccgtgctgagaggcttctctttcatggagccagtgctgatagcagtgcaacccctctttggcccacgggcaggaggcacctgtctcactcttgaaggccagagtctgtctgtaggcaccagccgggctgtgctggtcaatgggactgagtgtctgctagcacgggtcagtgaggggcagcttttatgtgccacaccccctggggccacggtggccagtgtcccccttagcctgcaggtggggggtgcccaggtacctggttcctggaccttccagtacagagaagaccctgtcgtgctaagcatcagccccaactgtggctacatcaactcccacatcaccatctgtggccagcatctaacttcagcatggcacttagtgctgtcattccatgacgggcttagggcagtggaaagcaggtgtgagaggcagcttccagagcagcagctgtgccgccttcctgaatatgtggtccgagacccccagggatgggtggcagggaatctgagtgcccgaggggatggagctgctggctttacactgcctggctttcgcttcctacccccaccccatccacccagtgccaacctagttccactgaagcctgaggagcatgccattaagtttgagtatattgggctgggcgctgtggctgactgtgtgggtatcaacgtgaccgtgggtggtgagagctgccagcacgagttccggggggacatggttgtctgccccctgcccccatccctgcagcttggccaggatggtgccccattgcaggtctgcgtagatggtgaatgtcatatcctgggtagagtggtgcggccagggccagatggggtcccacagagcacgctccttggtatcctgctgcctttgctgctgcttgtggctgcactggcgactgcactggtcttcagctactggtggcggaggaagcagctagttcttcctcccaacctgaatgacctggcatccctggaccagactgctggagccacacccctgcctattctgtactcgggctctgactacagaagtggccttgcactccctgccattgatggtctggattccaccacttgtgtccatggagcatccttctccgatagtgaagatgaatcctgtgtgccactgctgcggaaagagtccatccagctaagggacctggactctgcgctcttggctgaggtcaaggatgtgctgattccccatgagcgggtggtcacccacagtgaccgagtcattggcaaaggccactttggagttgtctaccacggagaatacatagaccaggcccagaatcgaatccaatgtgccatcaagtcactaagtcgcatcacagagatgcagcaggtggaggccttcctgcgagaggggctgctcatgcgtggcctgaaccacccgaatgtgctggctctcattggtatcatgttgccacctgagggcctgccccatgtgctgctgccctatatgtgccacggtgacctgctccagttcatccgctcacctcagcggaaccccaccgtgaaggacctcatcagctttggcctgcaggtagcccgcggcatggagtacctggcagagcagaagtttgtgcacagggacctggctgcgcggaactgcatgctggacgagtcattcacagtcaaggtggctgactttggtttggcccgcgacatcctggacagggagtactatagtgttcaacagcatcgccacgctcgcctacctgtgaagtggatggcgctggagagcctgcagacctatagatttaccaccaagtctgatgtgtggtcatttggtgtgctgctgtgggaactgctgacacggggtgccccaccataccgccacattgacccttttgaccttacccacttcctggcccagggtcggcgcctgccccagcctgagtattgccctgattctctgtaccaagtgatgcagcaatgctgggaggcagacccagcagtgcgacccaccttcagagtactagtgggggaggtggagcagatagtgtctgcactgcttggggaccattatgtgcagctgccagcaacctacatgaacttgggccccagcacctcgcatgagatgaatgtgcgtccagaacagccgcagttctcacccatgccagggaatgtacgccggccccggccactctcagagcctcctcggcccacttgacttagttcttgggctggacctgcttagctgccttgagctaaccccaaggctgcctctgggccatgccaggccagagcagtggccctccaccttgttcctgccctttaactttcagaggcaataggtaaatgggcccattaggtccctcactccacagagtgagccagtgagggcagtcctgcaacatgtatttatggagtgcctgctgtggaccctgtcttctgggcacagtggactcagcagtgaccacaccaacactgacccttgaaccaataaaggaacaaatgactattaaagcacaaaaaaaaaa

SEQ ID NO: 301 - DNA, 5737 bp, Homo sapiens
ggcagcggcggaagcggcgagggcggcgggcgtccggctctgaggtggtggaggcggcggaggcggcggcggaggcggcggcggctcgggactgggctcggctggaagcagcgagggtcagagcgccgcagcaagcgccgatctcccggctcgaccatccgcctgccgcccggacgcctgggccgcggagtttgtgtcccggctcggaccccggcgcccagcccggagccgtaaccttgaggcggcggcggcggggccgggccgggccgggctggggggcggtggcgctggatccgcggctgcccgatcgttggcgggagatgtcgaaccccgggacacgcaggaacggctccagcatcaagatccgtctgacagtgttatgtgccaagaaccttgcaaagaaagacttcttcaggctccctgacccttttgcaaagattgtcgtggatgggtctgggcagtgccactcaaccgacactgtgaaaaacacattggacccaaagtggaaccagcactatgatctatatgttgggaaaacggattcgataaccattagcgtgtggaaccataagaaaattcacaagaaacagggagctggcttcctgggctgtgtgcggctgctctccaatgccatcagcagattaaaagataccggataccagcgtttggatctatgcaaactaaacccctcagatactgatgcagttcgtggccagatagtggtcagtttacagacacgagacagaataggaaccggcggctcggtggtggactgcagaggactgttagaaaatgaaggaacggtgtatgaagactccgggcctgggaggccgctcagctgcttcatggaggaaccagccccttacacagatagcaccggtgctgctgctggaggagggaattgcaggttcgtggagtccccaagtcaagatcaaagacttcaggcacagcggcttcgaaaccctgatgtgcgaggttcactacagacgccccagaaccgaccacacggccaccagtccccggaactgcccgaaggctacgaacaaagaacaacagtccagggccaagtttactttttgcatacacagactggagttagcacgtggcacgaccccaggataccaagtccctcggggaccattcctgggggagatgcagcttttctatacgaattccttctacaaggccatacatctgagcccagagaccttaacagtgtgaactgtgatgaacttggaccactgccgccaggctgggaagtcagaagtacagtttctgggaggatatattttgtagatcataataaccgaacaacccagtttacagacccaaggttacaccacatcatgaatcaccagtgccaactcaaggagcccagccagccgctgccactgcccagtgagggctctctggaggacgaggagcttcctgcccagagatacgaaagagatctagtccagaagctgaaagtcctcagacacgaactgtcgcttcagcagccccaagctggtcattgccgcatcgaagtgtccagagaagaaatctttgaggagtcttaccgccagataatgaagatgcgaccgaaagacttgaaaaaacggctgatggtgaaattccgtggggaagaaggtttggattacggtggtgtggccagggagtggctttacttgctgtgccatgaaatgctgaatccttattacgggctcttccagtattctacggacaatatttacatgttgcaaataaatccggattcttcaatcaaccccgaccacttgtcttatttccactttgtggggcggatcatggggctggctgtgttccatggacactacatcaacgggggcttcacagtgcccttctacaagcagctgctggggaagcccatccagctctcagatctggaatctgtggacccagagctgcataagagcttggtgtggatcctagagaacgacatcacgcctgtactggaccacaccttctgcgtggaacacaacgccttcgggcggatcctgcagcatgaactgaaacccaatggcagaaatgtgccagtcacagaggagaataagaaagaatacgtccggttgtatgtaaactggaggtttatgagaggaatcgaagcccagttcttagctctgcagaaggggttcaatgagctcatccctcaacatctgctgaagccttttgaccagaaggaactggagctgatcataggcggcctggataaaatagacttgaacgactggaagtcgaacacgcggctgaagcactgtgtggccgacagcaacatcgtgcggtggttctggcaagcggtggagacgttcgatgaagaaaggagggccaggctcctgcagtttgtgactgggtccacgcgagtcccgctccaaggcttcaaggctttgcaaggttctacaggcgcggcagggccccggctgttcaccatccacctgatagacgcgaacacagacaaccttccgaaggcccatacctgctttaaccggatcgacattccaccatatgagtcctatgagaagctctacgagaagctgctgacagccgtggaggagacctgcgggtttgctgtggagtgaaaagcaaccaaaggcaacagagtctagctcatggccaccagaccaaaagcatccagcttctgtgcacctcctgcaaagctggcagaggccctggaattccagatcacctgaggggaaagggttgtctctctcctttctgttgggggagggggatgggggacttttgttggtggctcccacccatatatccctcctttaccatagtactcccacccacttccatcacccatccaataaaatgcagccaggtttagcctttggctttggtcacacaggatattctgctgtgttgcaacccatgtggtgataaggctcacagccctgagctctttacgggagcatcaactcacagttaggggactgggcgtggctgattgagggtttggaactggtggctatgccagctattccatctcaaaacagccttgaggccccttttcaatttgagcagctgctagatatcttatcagagctcagattccagatttcacatcccagcagccggttctgggtagcagatcaatttccaactggaaaataactatataatgtatgcttattggaattctgccacagcaggaagcttgagtcaaaatgtgtttcccctttgaaaggagaaggaattggagcagcttttcctggaggcccaggatatttcttttctgggtatcttggctgaaaattttgttttacatagagaaaaacgatcttttaagggtcccttttgctgcattatctgtccagtttgacttttttttcagtgaaaacaccatgtcatggagtgtaggaaagagcagaccaaaatcagccctagagccaaccagtcagtcccaaagctgtgacctctgtgccactgttgtccatagaagagcatcgactgtgtcacttaaaatattagtaaaccatgatgcagcaactgctaagagctaaactaacaaaattgtgtcatcatagctgctggcttggtgtgaactcgcttaaaagcaatggtgaaaggataacctcgatgatgtaaatccacccaaagatactgttctacaaaaagtagggtgtggacgcaaacctgtgacagcagagggggacgacttcacactcactgcctcatgtggcccctttcccagtggcagctggtgacactaacgattgctactcggttcacttgcccagatgtcttcatatgatgagcaaggccagaagcaaggctagattcgaagtttctgacaccatttccagtttgcacaaaagtcagtattttatcttaaagtggcttgatttccaatagctgaacttgggcagaaaacagcaggccaatgttcctatgtggtttctttgttgttgtttttgtttggggtgggggcaagtacagggtaattcatgagcaagacatttcactgctgtcgaagtctctgggatcccgctgtgggtctgagatggcctgggaaggaccttgtggacaatggttttatctgttctttttgtcactgttaatttctgggctgctgaggttctagaatagaagggctgccaaatgaggtttgctgcaggaggaaagtttaatcccccattccaaaagtccaggccaaatggtgggcttagcctctttgaaaagttctgccttgcccccacaggtgggcacatcctgtgtctcattcaccatgatgcttcctgagggtgttctagaagcccgttccccagtggctgtatccagcctttccttgcatcatcttcctcttgaaggtgaggaagtgaaaactacagacctcccccggacagcccactctctatcacgagcctaacccgcgggaggcggaagagacatccattcgagaactgaagcggcctccgggatgaggtcagaggccccacctgattttcctggtggtggtatccaaaatcttcagtaactaggaaggaaaccagggtctcatggtttaaaagactttgaagcaggaatgttgcatttgacgcctttaaaactacctttttgctgttgggaggagtcgggggcgagccttagcagctgcaccgccatccccatgctggttggtgctgccctgcctctcgtgccgggtgttgcttcagcccagagccagagggctgggtcccgggtcctccacaggtgaccccggtggacacacgcgttcccatcctggcctccgtctctgcttttccacttctacctgcgtgtgggtttgccgccttgtcatcggttgtgtgagtgtcgcagacctttccagagctccggttcactctttccaaacaggcctccctgtcggtggcactgcactcctagaaccttcagtttctacgatggtttgtttggtccttttgaaccaccccaaagaactcaacatggcaaagcaaatggtaaaagcttcccgactgttctactttgggtccgcgcgaagcccactcacgtgtgatctgtgttgcccctctcggtggtcccaggcgatccagccatgccccctgcccctctgcccagatgcttcaggggcccggcttttcaggcttgccctcaccagcggccgtcagccgacactcagggatgtagctaacaccactccgccagtgctttcagtaggaagagctgaggctgcctgggaggcccggggcgaccggaaaagggctctctcaagttctgaaaagagaatctgccaccagatcgaatttcgacccctgagcttgttcggacgtatggtccaaattcagattaaggtggtcacccaacccgagatgtcaggaaaggccttctgcagagaaaatgtccccccacccgccatctgcagccaggtgtgtgccacacggcagccttcccgaaacatagtatggattttaaaaatgtgtttatttttgtttctcaaccactttataacgtattttttaatttattttgtaatgtcttgttttgaagtattgctgctatccttgttatccttcccactgtttttatcactgatttattttgtgaaagttgtacactaatgttctatgtcaaaatcaaaagtatttaatgaaatactagttctatttaatgtggttatggaaccagctggaaacacaaaacaaacagtgattgtacagcaggctgggcccaggaggtcaggttcattttgttacatatgcaataaactcacgacttt

SEQ ID NO: 302 - DNA, 5077 bp, Homo sapiens
ctcatgcatatgcaggtgcgcgggtgacgaatgggcgagcgagctgtcagtctcgttccgaacttgttggctgcggtgccgggagcgcgggcgcgcagagccgaggccgggacccgctgccttcaccgccgccgccgtcgccgccgggtgggagccgggccgggcagccggagcgcggccgccagcgagccggagctgccgccgcccctgcacgcccgccgcccaggcccgcgcgccgcggcgctgcgctcgaccccgcccgcgccgccgccgccgccgcctctgccgctgccgctgcctctgcgggcgctcggagggcgggcgggcgctgggaggccggcgcggcggctgggagccgggcgcgggcggcggcggcggggccgggcgggcgggtcgcgggggcaatgcgggcgcagggccgggggcgccttccccggcggctgctgctgctgctggcgctctgggtgcaggcggcgcggcccatgggctatttcgagctgcagctgagcgcgctgcggaacgtgaacggggagctgctgagcggcgcctgctgtgacggcgacggccggacaacgcgcgcggggggctgcggccacgacgagtgcgacacgtacgtgcgcgtgtgccttaaggagtaccaggccaaggtgacgcccacggggccctgcagctacggccacggcgccacgcccgtgctgggcggcaactccttctacctgccgccggcgggcgctgcgggggaccgagcgcgggcgcgggcccgggccggcggcgaccaggacccgggcctcgtcgtcatccccttccagttcgcctggccgcgctcctttaccctcatcgtggaggcctgggactgggacaacgataccaccccgaatgaggagctgctgatcgagcgagtgtcgcatgccggcatgatcaacccggaggaccgctggaagagcctgcacttcagcggccacgtggcgcacctggagctgcagatccgcgtgcgctgcgacgagaactactacagcgccacttgcaacaagttctgccggccccgcaacgactttttcggccactacacctgcgaccagtacggcaacaaggcctgcatggacggctggatgggcaaggagtgcaaggaagctgtgtgtaaacaagggtgtaatttgctccacgggggatgcaccgtgcctggggagtgcaggtgcagctacggctggcaagggaggttctgcgatgagtgtgtcccctaccccggctgcgtgcatggcagttgtgtggagccctggcagtgcaactgtgagaccaactggggcggcctgctctgtgacaaagacctgaactactgtggcagccaccacccctgcaccaacggaggcacgtgcatcaacgccgagcctgaccagtaccgctgcacctgccctgacggctactcgggcaggaactgtgagaaggctgagcacgcctgcacctccaacccgtgtgccaacgggggctcttgccatgaggtgccgtccggcttcgaatgccactgcccatcgggctggagcgggcccacctgtgcccttgacatcgatgagtgtgcttcgaacccgtgtgcggccggtggcacctgtgtggaccaggtggacggctttgagtgcatctgccccgagcagtgggtgggggccacctgccagctggacgccaatgagtgtgaagggaagccatgccttaacgctttttcttgcaaaaacctgattggcggctattactgtgattgcatcccgggctggaagggcatcaactgccatatcaacgtcaacgactgtcgcgggcagtgtcagcatgggggcacctgcaaggacctggtgaacgggtaccagtgtgtgtgcccacggggcttcggaggccggcattgcgagctggaacgagacgagtgtgccagcagcccctgccacagcggcggcctctgcgaggacctggccgacggcttccactgccactgcccccagggcttctccgggcctctctgtgaggtggatgtcgacctttgtgagccaagcccctgccggaacggcgctcgctgctataacctggagggtgactattactgcgcctgccctgatgactttggtggcaagaactgctccgtgccccgcgagccgtgccctggcggggcctgcagagtgatcgatggctgcgggtcagacgcggggcctgggatgcctggcacagcagcctccggcgtgtgtggcccccatggacgctgcgtcagccagccagggggcaacttttcctgcatctgtgacagtggctttactggcacctactgccatgagaacattgacgactgcctgggccagccctgccgcaatgggggcacatgcatcgatgaggtggacgccttccgctgcttctgccccagcggctgggagggcgagctctgcgacaccaatcccaacgactgccttcccgatccctgccacagccgcggccgctgctacgacctggtcaatgacttctactgtgcgtgcgacgacggctggaagggcaagacctgccactcacgcgagttccagtgcgatgcctacacctgcagcaacggtggcacctgctacgacagcggcgacaccttccgctgcgcctgcccccccggctggaagggcagcacctgcgccgtcgccaagaacagcagctgcctgcccaacccctgtgtgaatggtggcacctgcgtgggcagcggggcctccttctcctgcatctgccgggacggctgggagggtcgtacttgcactcacaataccaacgactgcaaccctctgccttgctacaatggtggcatctgtgttgacggcgtcaactggttccgctgcgagtgtgcacctggcttcgcggggcctgactgccgcatcaacatcgacgagtgccagtcctcgccctgtgcctacggggccacgtgtgtggatgagatcaacgggtatcgctgtagctgcccacccggccgagccggcccccggtgccaggaagtgatcgggttcgggagatcctgctggtcccggggcactccgttcccacacggaagctcctgggtggaagactgcaacagctgccgctgcctggatggccgccgtgactgcagcaaggtgtggtgcggatggaagccttgtctgctggccggccagcccgaggccctgagcgcccagtgcccactggggcaaaggtgcctggagaaggccccaggccagtgtctgcgaccaccctgtgaggcctggggggagtgcggcgcagaagagccaccgagcaccccctgcctgccacgctccggccacctggacaataactgtgcccgcctcaccttgcatttcaaccgtgaccacgtgccccagggcaccacggtgggcgccatttgctccgggatccgctccctgccagccacaagggctgtggcacgggaccgcctgctggtgttgctttgcgaccgggcgtcctcgggggccagtgccgtggaggtggccgtgtccttcagccctgccagggacctgcctgacagcagcctgatccagggcgcggcccacgccatcgtggccgccatcacccagcgggggaacagctcactgctcctggctgtcaccgaggtcaaggtggagacggttgttacgggcggctcttccacaggtctgctggtgcctgtgctgtgtggtgccttcagcgtgctgtggctggcgtgcgtggtcctgtgcgtgtggtggacacgcaagcgcaggaaagagcgggagaggagccggctgccgcgggaggagagcgccaacaaccagtgggccccgctcaaccccatccgcaaccccatcgagcggccggggggccacaaggacgtgctctaccagtgcaagaacttcacgccgccgccgcgcagggcggacgaggcgctgcccgggccggccggccacgcggccgtcagggaggatgaggaggacgaggatctgggccgcggtgaggaggactccctggaggcggagaagttcctctcacacaaattcaccaaagatcctggccgctcgccggggaggccggcccactgggcctcaggccccaaagtggacaaccgcgcggtcaggagcatcaatgaggcccgctacgccggcaaggagtaggggcggctgccagctgggccgggacccagggccctcggtgggagccatgccgtctgccggacccggaggccgaggccatgtgcatagtttctttattttgtgtaaaaaaaccaccaaaaacaaaaaccaaatgtttattttctacgtttctttaaccttgtataaattattcagtaactgtcaggctgaaaacaatggagtattctcggatagttgctatttttgtaaagtttccgtgcgtggcactcgctgtatgaaaggagagagcaaagggtgtctgcgtcgtcaccaaatcgtagcgtttgttaccagaggttgtgcactgtttacagaatcttccttttattcctcactcgggtttctctgtggctccaggccaaagtgccggtgagacccatggctgtgttggtgtggcccatggctgttggtgggacccgtggctgatggtgtggcctgtggctgtcggtgggactcgtggctgtcaatgggacctgtggctgtcggtgggacctacggtggtcggtgggaccctggttattgatgtggccctggctgccggcacggcccgtggctgttgacgcacctgtggttgttagtggggcctgaggtcatcggcgtggcccaaggccggcaggtcaacctcgcgcttgctggccagtccaccctgcctgccgtctgtgcttcctcctgcccagaacgcccgctccagcgatctctccactgtgctttcagaagtgcccttcctgctgcgcagttctcccatcctgggacggcggcagtattgaagctcgtgacaagtgccttcacacagacccctcgcaactgtccacgcgtgccgtggcaccaggcgctgcccacctgccggccccggccgcccctcctcgtgaaagtgcatttttgtaaatgtgtacatattaaaggaagcactctgtatatttgattgaataatgccacca

SEQ ID NO: 303 - DNA, 1797 bp, Homo sapiens
ccagcagggagctgggagctgggggaaacgacgccaggaaagctatcgcgccagagagggcgacgggggctcgggaagcctgacagggcttttgcgcacagctgccggctggctgctacccgcccgcgccagcccccgagaacgcgcgaccaggcacccagtccggtcaccgcagcggagagctcgccgctcgctgcagcgaggcccggagcggccccgcagggaccctccccagaccgcctgggccgcccggatgtgcactaaaatggaacagcccttctaccacgacgactcatacacagctacgggatacggccgggcccctggtggcctctctctacacgactacaaactcctgaaaccgagcctggcggtcaacctggccgacccctaccggagtctcaaagcgcctggggctcgcggacccggcccagagggcggcggtggcggcagctacttttctggtcagggctcggacaccggcgcgtctctcaagctcgcctcttcggagctggaacgcctgattgtccccaacagcaacggcgtgatcacgacgacgcctacacccccgggacagtacttttacccccgcgggggtggcagcggtggaggtgcagggggcgcagggggcggcgtcaccgaggagcaggagggcttcgccgacggctttgtcaaagccctggacgatctgcacaagatgaaccacgtgacaccccccaacgtgtccctgggcgctaccggggggcccccggctgggcccgggggcgtctacgccggcccggagccacctcccgtttacaccaacctcagcagctactccccagcctctgcgtcctcgggaggcgccggggctgccgtcgggaccgggagctcgtacccgacgaccaccatcagctacctcccacacgcgccgcccttcgccggtggccacccggcgcagctgggcttgggccgcggcgcctccaccttcaaggaggaaccgcagaccgtgccggaggcgcgcagccgggacgccacgccgccggtgtcccccatcaacatggaagaccaagagcgcatcaaagtggagcgcaagcggctgcggaaccggctggcggccaccaagtgccggaagcggaagctggagcgcatcgcgcgcctggaggacaaggtgaagacgctcaaggccgagaacgcggggctgtcgagtaccgccggcctcctccgggagcaggtggcccagctcaaacagaaggtcatgacccacgtcagcaacggctgtcagctgctgcttggggtcaagggacacgccttctgaacgtcccctgcccctttacggacaccccctcgcttggacggctgggcacacgcctcccactggggtccagggagcaggcggtgggcacccaccctgggacctaggggcgccgcaaaccacactggactccggcccccctaccctgcgcccagtccttccacctcgacgtttacaagcccccccttccacttttttttgtatgttttttttctgctggaaacagactcgattcatattgaatataatatatttgtgtatttaacagggaggggaagagggggcgatcgcggcggagctggccccgccgcctggtactcaagcccgcggggacattgggaaggggacccccgccccctgccctcccctctctgcaccgtactgtggaaaagaaacacgcacttagtctctaaagagtttattttaagacgtgtttgtgtttgtgtgtgtttgttctttttattgaatctatttaagtaaaaaaaaaattggttctttattaa

SEQ ID NO: 304 - DNA, 2470 bp, Homo sapiens
ggcggctgtagccgagggggcggccggaaagcagcggcggcgtctggggcgctttcgcaacattcagacctcggttgcagcccggtgccgtgagctgaagaggtttcacatcttactccgccccacaccctgggcgttgcggcgctgggctcgttgctgcagccggaccctgctcgatgggcacgactgggctggagagtctgagtctgggggaccgcggagctgcccccaccgtcacctctagtgagcgcctagtcccagacccgccgaatgacctccgcaaagaagatgttgctatggaattggaaagagtgggagaagatgaggaacaaatgatgataaaaagaagcagtgaatgtaatcccttgctacaagaacccatcgcttctgctcagtttggtgctactgcaggaacagaatgccgtaagtctgtcccatgtggatgggaaagagttgtgaagcaaaggttatttgggaagacagcaggaagatttgatgtgtactttatcagcccacaaggactgaagttcagatccaaaagttcacttgctaattatcttcacaaaaatggagagacttctcttaagccagaagattttgattttactgtactttctaaaaggggtatcaagtcaagatataaagactgcagcatggcagccctgacatcccatctacaaaaccaaagtaacaattcaaactggaacctcaggacccgaagcaagtgcaaaaaggatgtgtttatgccgccaagtagtagttcagagttgcaggagagcagaggactctctaactttacttccactcatttgcttttgaaagaagatgagggtgttgatgatgttaacttcagaaaggttagaaagcccaaaggaaaggtgactattttgaaaggaatcccaattaagaaaactaaaaaaggatgtaggaagagctgttcaggttttgttcaaagtgatagcaaaagagaatctgtgtgtaataaagcagatgctgaaagtgaacctgttgcacaaaaaagtcagcttgatagaactgtctgcatttctgatgctggagcatgtggtgagaccctcagtgtgaccagtgaagaaaacagccttgtaaaaaaaaaagaaagatcattgagttcaggatcaaatttttgttctgaacaaaaaacttctggcatcataaacaaattttgttcagccaaagactcagaacacaacgagaagtatgaggatacctttttagaatctgaagaaatcggaacaaaagtagaagttgtggaaaggaaagaacatttgcatactgacattttaaaacgtggctctgaaatggacaacaactgctcaccaaccaggaaagacttcactggtgagaaaatatttcaagaagataccatcccacgaacacagatagaaagaaggaaaacaagcctgtatttttccagcaaatataacaaagaagctcttagccccccacgacgtaaagcctttaagaaatggacacctcctcggtcaccttttaatctcgttcaagaaacactttttcatgatccatggaagcttctcatcgctactatatttctcaatcggacctcaggcaaaatggcaatacctgtgctttggaagtttctggagaagtatccttcagctgaggtagcaagaaccgcagactggagagatgtgtcagaacttcttaaacctcttggtctctacgatcttcgggcaaaaaccattgtcaagttctcagatgaatacctgacaaagcagtggaagtatccaattgagcttcatgggattggtaaatatggcaacgactcttaccgaattttttgtgtcaatgagtggaagcaggtgcaccctgaagaccacaaattaaataaatatcatgactggctttgggaaaatcatgaaaaattaagtctatcttaaactctgcagctttcaagctcatctgttatgcatagctttgcacttcaaaaaagcttaattaagtacaaccaaccacctttccagccatagagattttaattagcccaactagaagcctagtgtgtgtgctttcttaatgtgtgtgccaatggtggatctttgctactgaatgtgtttgaacatgttttgagatttttttaaaataaattattatttgacaacaatccaaaaaaaatacggcttttccaatgatgaaatataatcagaagatgaaaaatagttttaaactatcaataatacaaagcaaatttctatcagccttgctaaagctaggggcccactaaatatttttatcggctaggcgtggtggtgcatgcctgtaatctcggaaggctgaggcaggaggatcatttgagctcatgagggcccaggaggtcaaggcttcagtgagccatgatcatgccactgcactccagtctggatgacagagagagaccctgtctcaaaaaatatatatttaaaaaataaaaataaaagctgaccccaaagac

SEQ ID NO: 305 - DNA, 2055 bp, Homo sapiens
gcactttccctggagtggaagctgctggaaggcggaccggccgccatgtccacgttcaggcaggaggacgtggaggaccattatgagatgggggaggagctgggcagcggccagtttgcgatcgtgcggaagtgccggcagaagggcacgggcaaggagtacgcagccaagttcatcaagaagcgccgcctgtcatccagccggcgtggggtgagccgggaggagatcgagcgggaggtgaacatcctgcgggagatccggcaccccaacatcatcaccctgcacgacatcttcgagaacaagacggacgtggtcctcatcctggagctggtctctggcggggagctctttgacttcctggcggagaaggagtcgctgacggaggacgaggccacccagttcctcaagcagatcctggacggcgttcactacctgcactctaagcgcatcgcacactttgacctgaagccggaaaacatcatgctgctggacaagaacgtgcccaacccacgaatcaagctcatcgacttcggcatcgcgcacaagatcgaggcggggaacgagttcaagaacatcttcggcaccccggagtttgtggccccagagattgtgaactatgagccgctgggcctggaggcggacatgtggagcatcggtgtcatcacctatatcctcctgagcggtgcatccccgttcctgggcgagaccaagcaggagacgctcaccaacatctcagccgtgaactacgacttcgacgaggagtacttcagcaacaccagcgagctggccaaggacttcattcgccggctgctcgtcaaagatcccaagcggagaatgaccattgcccagagcctggaacattcctggattaaggcgatccggcggcggaacgtgcgtggtgaggacagcggccgcaagcccgagcggcggcgcctgaagaccacgcgtctgaaggagtacaccatcaagtcgcactccagcttgccgcccaacaacagctacgccgacttcgagcgcttctccaaggtgctggaggaggcggcggccgccgaggagggcctgcgcgagctgcagcgcagccggcggctctgccacgaggacgtggaggcgctggccgccatctacgaggagaaggaggcctggtaccgcgaggagagcgacagcctgggccaggacctgcggaggctacggcaggagctgctcaagaccgaggcgctcaagcggcaggcgcaggaggaggccaagggcgcgctgctggggaccagcggcctcaagcgccgcttcagccgcctggagaaccgctacgaggcgctggccaagcaagtagcctccgagatgcgcttcgtgcaggacctcgtgcgcgccctggagcaggagaagctgcagggcgtggagtgcgggctgcgctaggcgcagtggggtgggccaggccccaggacagccggagctcggcctgcggtgggggcgcttcctgtggacgctgcgcctcccatcgcccgggtgcctgtccttgcccagcgccaccaggctggaggcggagtgggaggagctggagccaggcccgtaagttcgcaggcaggggtgggtgtgggacggggctgcttctctacacatcctccacgctggccttcaccttcacccctgcatcgtcggtgaccctgggaccctccaggcagcgtggcctgtggcaccgtgagggttgggacccaccgaggcgcagaggcggcccgaatgcagccctggttcaggcccggaggagggtttgcgggtagttgcacggacaattcggcggggtgctgcctgttgctgccattagcccaggaggaggtcgtgggacggggagggtgggatggacggcggacaggcagtccccacgctgctgggtggcgccgggcttggtggggtcttccactgtgtgcccttctcgccgaggccggtcccccgggtgtggggtgccctgctgcggactcctccgcgagccccatcgtcgcgcctgtggacgcctaggcaagagcggccctctgcagccaagagaaataaaatactggcttccag

SEQ ID NO: 306 - DNA, 1488 bp, Homo sapiens
acattcactacaccttttccatttgctaataaggccctgccaggctgggagggaattgtccctgcctgcttctggagaaagaagatattgacaccatctacgggcaccatggaactgcttcaagtgaccattctttttcttctgcccagtatttgcagcagtaacagcacaggtgttttagaggcagctaataattcacttgttgttactacaacaaaaccatctataacaacaccaaacacagaatcattacagaaaaatgttgtcacaccaacaactggaacaactcctaaaggaacaatcaccaatgaattacttaaaatgtctctgatgtcaacagctacttttttaacaagtaaagatgaaggattgaaagccacaaccactgatgtcaggaagaatgactccatcatttcaaacgtaacagtaacaagtgttacacttccaaatgctgtttcaacattacaaagttccaaacccaagactgaaactcagagttcaattaaaacaacagaaataccaggtagtgttctacaaccagatgcatcaccttctaaaactggtacattaacctcaataccagttacaattccagaaaacacctcacagtctcaagtaataggcactgagggtggaaaaaatgcaagcacttcagcaaccagccggtcttattccagtattattttgccggtggttattgctttgattgtaataacactttcagtatttgttctggtgggtttgtaccgaatgtgctggaaggcagatccgggcacaccagaaaatggaaatgatcaacctcagtctgataaagagagcgtgaagcttcttaccgttaagacaatttctcatgagtctggtgagcactctgcacaaggaaaaaccaagaactgacagcttgaggaattctctccacacctaggcaataattacgcttaatctccagcttctatgcaccaagcgtggaaaaggagaaagtcctgcagaatcaatcccgacttccatacctgctgctggactgtaccagacgtctgtcccagtaaagtgatgtccagctgacatgcaataatttgatggaatcaaaaagaaccccggggctctcctgttctctcacatttaaaaattccattactccatttacaggagcgttcctaggaaaaggaattttaggaggagaatttgtgagcagtgaatctgacagcccaggaggtgggctcgctgataggcatgactttccttaatgtttaaagttttccgggccaagaatttttatccatgaagactttcctacttttctcggtgttcttatattacctactgttagtatttattgtttaccactatgttaatgcagggaaaagttgcacgtgtattattaaatattaggtagaaatcataccatgctactttgtacatataagtattttattcctgctttcgtgttacttttaataaataactactgtactcaatactctaaaaaaaaaa

SEQ ID NO: 307 - DNA, 3219 bp, Homo sapiens
ctgctggaagtcctctgggattcaagaatgaagagtagttttacagaaaaaagaggacaatattgggatcacctttgacctttccatttggaaataatattttctattgtgttatagaaaggtgggaagctttcatccagaacaatgaatttcataaaggacaatagccgagcccttattcaaagaatgggaatgactgttataaagcaaatcacagatgacctatttgtatggaatgttctgaatcgcgaagaagtaaacatcatttgctgcgagaaggtggagcaggatgctgctagagggatcattcacatgattttgaaaaagggttcagagtcctgtaacctctttcttaaatcccttaaggagtggaactatcctctatttcaggacttgaatggacaaagtctttttcatcagacatcagaaggagacttggacgatttggctcaggatttaaaggacttgtaccataccccatcttttctgaacttttatccccttggtgaagatattgacattatttttaacttgaaaagcaccttcacagaacctgtcctgtggaggaaggaccaacaccatcaccgcgtggagcagctgaccctgaatggcctcctgcaggctcttcagagcccctgcatcattgaaggggaatctggcaaaggcaagtccactctgctgcagcgaattgccatgctctggggctccggaaagtgcaaggctctgaccaagttcaaattcgtcttcttcctccgtctcagcagggcccagggtggactttttgaaaccctctgtgatcaactcctggatatacctggcacaatcaggaagcagacattcatggccatgctgctgaagctgcggcagagggttcttttccttcttgatggctacaatgaattcaagccccagaactgcccagaaatcgaagccctgataaaggaaaaccaccgcttcaagaacatggtcatcgtcaccactaccactgagtgcctgaggcacatacggcagtttggtgccctgactgctgaggtgggggatatgacagaagacagcgcccaggctctcatccgagaagtgctgatcaaggagcttgctgaaggcttgttgctccaaattcagaaatccaggtgcttgaggaatctcatgaagacccctctctttgtggtcatcacttgtgcaatccagatgggtgaaagtgagttccactctcacacacaaacaacgctgttccataccttctatgatctgttgatacagaaaaacaaacacaaacataaaggtgtggctgcaagtgacttcattcggagcctggaccactgtggagacctagctctggagggtgtgttctcccacaagtttgatttcgaactgcaggatgtgtccagcgtgaatgaggatgtcctgctgacaactgggctcctctgtaaatatacagctcaaaggttcaagccaaagtataaattctttcacaagtcattccaggagtacacagcaggacgaagactcagcagtttattgacgtctcatgagccagaggaggtgaccaaggggaatggttacttgcagaaaatggtttccatttcggacattacatccacttatagcagcctgctccggtacacctgtgggtcatctgtggaagccaccagggctgttatgaagcacctcgcagcagtgtatcaacacggctgccttctcggactttccatcgccaagaggcctctctggagacaggaatctttgcaaagtgtgaaaaacaccactgagcaagaaattctgaaagccataaacatcaattcctttgtagagtgtggcatccatttatatcaagagagtacatccaaatcagccctgagccaagaatttgaagctttctttcaaggtaaaagcttatatatcaactcagggaacatccccgattacttatttgacttctttgaacatttgcccaattgtgcaagtgccctggacttcattaaactggacttttatgggggagctatggcttcatgggaaaaggctgcagaagacacaggtggaatccacatggaagaggccccagaaacctacattcccagcagggctgtatctttgttcttcaactggaagcaggaattcaggactctggaggtcacactccgggatttcagcaagttgaataagcaagatatcagatatctggggaaaatattcagctctgccacaagcctcaggctgcaaataaagagatgtgctggtgtggctggaagcctcagtttggtcctcagcacctgtaagaacatttattctctcatggtggaagccagtcccctcaccatagaagatgagaggcacatcacatctgtaacaaacctgaaaaccttgagtattcatgacctacagaatcaacggctgccgggtggtctgactgacagcttgggtaacttgaagaaccttacaaagctcataatggataacataaagatgaatgaagaagatgctataaaactagctgaaggcctgaaaaacctgaagaagatgtgtttatttcatttgacccacttgtctgacattggagagggaatggattacatagtcaagtctctgtcaagtgaaccctgtgaccttgaagaaattcaattagtctcctgctgcttgtctgcaaatgcagtgaaaatcctagctcagaatcttcacaatttggtcaaactgagcattcttgatttatcagaaaattacctggaaaaagatggaaatgaagctcttcatgaactgatcgacaggatgaacgtgctagaacagctcaccgcactgatgctgccctggggctgtgacgtgcaaggcagcctgagcagcctgttgaaacatttggaggaggtcccacaactcgtcaagcttgggttgaaaaactggagactcacagatacagagattagaattttaggtgcattttttggaaagaaccctctgaaaaacttccagcagttgaatttggcgggaaatcgtgtgagcagtgatggatggcttgccttcatgggtgtatttgagaatcttaagcaattagtgttttttgactttagtactaaagaatttctacctgatccagcattagtcagaaaacttagccaagtgttatccaagttaacttttctgcaagaagctaggcttgttgggtggcaatttgatgatgatgatctcagtgttattacaggtgcttttaaactagtaactgcttaa

SEQ ID NO: 308 - DNA, 1471 bp, Homo sapiens
atcacacaggatccggagctggtgctgataacagcggaatcccccgtctacctctctccttggtcctggaacagcgctactgatcaccaagtagccacaaaatataataaaccctcagcacttgctcagtagttttgtgaaagtctcaagtaaaagagacacaaacaaaaaattctttttcgtgaagaactccaaaaataaaattctctagagataaaaaaaaaaaaaaaaggaaaatgccagctgatataatggagaaaaattcctcgtccccggtggctgctaccccagccagtgtcaacacgacaccggataaaccaaagacagcatctgagcacagaaagtcatcaaagcctattatggagaaaagacgaagagcaagaataaatgaaagtctgagccagctgaaaacactgattttggatgctctgaagaaagatagctcgcggcattccaagctggagaaggcggacattctggaaatgacagtgaagcacctccggaacctgcagcgggcgcagatgacggctgcgctgagcacagacccaagtgtgctggggaagtaccgagccggcttcagcgagtgcatgaacgaggtgacccgcttcctgtccacgtgcgagggcgttaataccgaggtgcgcactcggctgctcggccacctggccaactgcatgacccagatcaatgccatgacctaccccgggcagccgcaccccgccttgcaggcgccgccaccgcccccaccgggacccggcggcccccagcacgcgccgttcgcgccgccgccgccactcgtgcccatccccgggggcgcggcgccccctcccggcggcgccccctgcaagctgggcagccaggctggagaggcggctaaggtgtttggaggcttccaggtggtaccggctcccgatggccagtttgctttcctcattcccaacggggccttcgcgcacagcggccctgtcatccccgtctacaccagcaacagcggcacctccgtgggccccaacgcagtgtcaccttccagcggcccctcgcttacggcggactccatgtggaggccgtggcggaactgagggggctcaggccacccctcctcctaaactccccaacccacctctcttccctccggactctaaacaggaacttgaatactgggagagaagaggacttttttgattaagtggttactttgtgtttttttaatttctaagaagttactttttgtagagagagctgtattaagtgactgaccatgcactatatttgtatatattttatatgttcatattggattgcgcctttgtattataaaagctcagatgacatttcgttttttacacgagatttcttttttatgtgatgccaaagatgtttgaaaatgctcttaaaatatcttcctttggggaagtttatttgagaaaatataataaaagaaaaaagtaaaggcaaaaaaaaaaaaaaaaaa

SEQ ID NO: 309 - DNA, 2574 bp, Homo sapiens
cctgtttagacacatggacaacaatcccagcgctacaaggcacacagtccgcttcttcgtcctcagggttgccagcgcttcctggaagtcctgaagctctcgcagtgcagtgagttcatgcaccttcttgccaagcctcagtctttgggatctggggaggccgcctggttttcctccctccttctgcacgtctgctggggtctcttcctctccaggccttgccgtccccctggcctctcttcccagctcacacatgaagatgcacttgcaaagggctctggtggtcctggccctgctgaactttgccacggtcagcctctctctgtccacttgcaccaccttggacttcggccacatcaagaagaagagggtggaagccattaggggacagatcttgagcaagctcaggctcaccagcccccctgagccaacggtgatgacccacgtcccctatcaggtcctggccctttacaacagcacccgggagctgctggaggagatgcatggggagagggaggaaggctgcacccaggaaaacaccgagtcggaatactatgccaaagaaatccataaattcgacatgatccaggggctggcggagcacaacgaactggctgtctgccctaaaggaattacctccaaggttttccgcttcaatgtgtcctcagtggagaaaaatagaaccaacctattccgagcagaattccgggtcttgcgggtgcccaaccccagctctaagcggaatgagcagaggatcgagctcttccagatccttcggccagatgagcacattgccaaacagcgctatatcggtggcaagaatctgcccacacggggcactgccgagtggctgtcctttgatgtcactgacactgtgcgtgagtggctgttgagaagagagtccaacttaggtctagaaatcagcattcactgtccatgtcacacctttcagcccaatggagatatcctggaaaacattcacgaggtgatggaaatcaaattcaaaggcgtggacaatgaggatgaccatggccgtggagatctggggcgcctcaagaagcagaaggatcaccacaaccctcatctaatcctcatgatgattcccccacaccggctcgacaacccgggccaggggggtcagaggaagaagcgggctttggacaccaattactgcttccgcaacttggaggagaactgctgtgtgcgccccctctacattgacttccgacaggatctgggctggaagtgggtccatgaacctaagggctactatgccaacttctgctcaggcccttgcccatacctccgcagtgcagacacaacccacagcacggtgctgggactgtacaacactctgaaccctgaagcatctgcctcgccttgctgcgtgccccaggacctggagcccctgaccatcctgtactatgttgggaggacccccaaagtggagcagctctccaacatggtggtgaagtcttgtaaatgtagctgagaccccacgtgcgacagagagaggggagagagaaccaccactgcctgactgcccgctcctcgggaaacacacaagcaacaaacctcactgagaggcctggagcccacaaccttcggctccgggcaaatggctgagatggaggtttccttttggaacatttctttcttgctggctctgagaatcacggtggtaaagaaagtgtgggtttggttagaggaaggctgaactcttcagaacacacagactttctgtgacgcagacagaggggatggggatagaggaaagggatggtaagttgagatgttgtgtggcaatgggatttgggctaccctaaagggagaaggaagggcagagaatggctgggtcagggccagactggaagacacttcagatctgaggttggatttgctcattgctgtaccacatctgctctagggaatctggattatgttatacaaggcaagcatttttttttttaaagacaggttacgaagacaaagtcccagaattgtatctcatactgtctgggattaagggcaaatctattacttttgcaaactgtcctctacatcaattaacatcgtgggtcactacagggagaaaatccaggtcatgcagttcctggcccatcaactgtattgggccttttggatatgctgaacgcagaagaaagggtggaaatcaaccctctcctgtctgccctctgggtccctcctctcacctctccctcgatcatatttccccttggacacttggttagacgccttccaggtcaggatgcacatttctggattgtggttccatgcagccttggggcattatgggtcttcccccacttcccctccaagaccctgtgttcatttggtgttcctggaagcaggtgctacaacatgtgaggcattcggggaagctgcacatgtgccacacagtgacttggccccagacgcatagactgaggtataaagacaagtatgaatattactctcaaaatctttgtataaataaatatttttggggcatcctggatgatttcatcttctggaatattgtttctagaacagtaaaagccttattctaaggtg

SEQ ID NO: 310 - DNA, 27435 bp, Homo sapiens
cggccgccggccgcagcgggctgagattgttgtcctctgtcaccagggcggctgggctcccgcagtcctgcagaccgcgcccgatcccggcgacagggcgggcggacagccgcgcatccccggggtcccgccgagcctgggcgcagagagccgggaggaagcgttcgctcgcttcgccttgctgctgggaaactgaacgaggccgagagagaaggttcttgagttcatgtaagaggacagtcttaaaacggaagaagaaaaagaagcagttcagtctttgggagagctgcctccttgttgagtgctgcaaaggcctggaattcatttatgacagaatagatctagaaaagtccaagcatgttttctagagtggtgtagccctgtgctgcctccagtgaagagtctcttggtgttggcttcgtgcttccggagggaccatggcaacctccagaggggcctcccggtgtcctcgggatatcgccaatgtgatgcagaggctgcaagatgagcaagagatagtacaaaaacgaactttcacaaaatggatcaactctcatctggccaagcggaaacctccaatggtggtggacgatctttttgaagacatgaaagatggtgttaaactgcttgcccttctggaggtcctgtctgggcagaaactgccttgtgaacaaggacgccggatgaagcgaatccatgctgtggctaacattggcacggcactcaagttcctcgaaggaagaaagtccatgcacagaggatcaccgattaaattagtcaacattaactccaccgatatagctgatggccgaccctcaatagttcttggattgatgtggaccattattctatatttccagattgaagagttgaccagcaacctgccccagctccagtctttgtccagcagcgcatcctccgtggacagcatagttagctctgagactcccagcccaccaagtaaacggaaggtgaccaccaagatccaaggaaatgctaagaaggctttattaaagtgggttcagtacacagctggcaagcagactggaatagaagtaaaagattttgggaagagttggagaagcggggttgcctttcattcagttattcatgccattcgaccggaattggtggacttggagacagtgaaaggcagatccaaccgagaaaatttggaggatgctttcactatcgccgaaacagaactggggatcccaagactgctagatcctgaagacgttgatgtggataaaccagatgagaaatctattatgacctatgtagcccagtttctgaaacattatcctgacatccacaatgcaagcactgatgggcaagaggatgatgaaatacttccaggtttcccatcttttgcaaattctgtacaaaattttaagagagaagacagagtaatttttaaggaaatgaaagtttggatagaacaatttgagagagatttgacaagagcacagatggtggaatcaaatttacaggataaatatcagtcatttaagcacttcagagttcaatatgaaatgaagaggaaacagattgaacatttaatacaaccattacacagagacggtaaattgtcacttgaccaagcattggtaaaacaatcttgggatagagtgacctccaggctctttgactggcatatacagcttgataaatctcttcctgcacctctgggcaccataggtgcctggctgtacagagcggaggtggccctgagagaggaaataaccgttcaacaggtccacgaggaaacagcaaacacgatacaacggaaacttgagcaacataaggatctgcttcaaaacacggatgcccacaaaagagcattccatgaaatctaccggaccaggtctgttaacgggattccagtgccacctgatcaattagaggacatggccgagaggtttcattttgtttcctccacatcagagctacacctaatgaaaatggaatttttagaattaaagtaccgtctgctctcactgctggttcttgcagagtcaaagctgaagtcttggatcattaagtacgggaggagagagtcagtggagcagcttctacaaaactacgtgtcttttatagaaaatagcaagttctttgaacaatatgaggtgacataccagatcttgaaacagacagctgagatgtatgtcaaagcagatggttcagtggaagaagctgagaatgtgatgaaattcatgaatgaaaccaccgctcagtggaggaatctctcagtagaagtgaggagtgtgaggagcatgctggaagaagtgatctctaactgggatcgctatggcaatacagtggctagtctgcaagcctggctagaggatgctgaaaaaatgctcaatcaatcagaaaatgccaaaaaggatttttttcgaaatttacctcattggattcagcagcatactgccatgaacgatgctggcaattttctaattgaaacctgtgatgagatggtttcccgtgacctgaagcagcaattactgttgctaaatgggcggtggagggagttgtttatggaagtcaagcaatatgctcaagctgatgagatggacagaatgaagaaggaatacacagactgtgttgttaccctgtctgcttttgcaacggaagcccataagaaactttctgaacccttagaagtctcttttatgaatgtcaagctattaattcaagacttggaggatattgagcagagggtgcctgtgatggatgcccaatacaagataattacaaagacagcacacctcattaccaaagaaagcccccaagaagaaggaaaagaaatgtttgcgaccatgtcaaagctcaaagagcagctaaccaaggtcaaagaatgttactccccactcctttatgagtctcagcagctgttgattccgttggaggaattagaaaagcagatgacgtccttttatgactcacttgggaaaatcaatgaaattatcacagttcttgagcgtgaggcacaatcgagtgccctttttaaacaaaaacatcaggaactgttagcttgtcaagaaaactgtaagaaaaccttgacacttattgagaaaggcagtcaaagtgttcaaaagtttgtgaccttgagcaacgtgttaaagcattttgatcagacgaggctacaaagacagattgcagatattcatgttgcttttcagagtatggtaaagaaaactggagattggaagaagcatgtggaaaccaacagtcgcttgatgaagaagtttgaggagtctcgagcagagttggagaaggtactgcggattgctcaggagggcctggaggaaaagggggatccagaggagctcctgcggagacacactgagtttttcagtcagctggatcagagggtgctcaatgctttcctgaaagcttgtgatgaactcaccgacatccttccagagcaggagcagcaggggctgcaggaagctgttcgaaagctccacaaacaatggaaggatcttcaaggagaagccccttatcatttgcttcatctgaagattgatgtggagaagaataggttcttagcctctgtagaagaatgcagaactgagctggatcgagagaccaagctgatgccccaggaaggcagtgaaaagataattaaagagcacagggttttcttcagtgacaaaggtcctcatcatctctgtgagaaaaggttacagctcatcgaggaactctgtgtgaaactcccagtgcgggacccagtaagggacacacctggaacctgtcacgtgactctcaaagagctcagagctgccattgacagcacctacaggaagctcatggaagacccagacaagtggaaggactacactagcagattctctgagttctcatcttggatatctacaaatgagacacaattaaaggggatcaagggtgaggccatcgatactgccaaccacggagaggttaaacgtgccgttgaagagatcagaaatggtgttaccaaaaggggtgagaccctcagctggctgaaatccaggctgaaagttttgacagaagtttcttctgagaatgaagcccaaaagcagggagatgagctggcaaaattatccagctctttcaaggctcttgtgacgctgctgtcagaggttgaaaagatgctaagcaattttggggactgtgtccagtacaaagaaatagtcaaaaattctctcgaagaattaatttctggctctaaagaagtccaggaacaagctgagaagatcttggatactgaaaatctgtttgaagcacagcagttacttcttcatcaccagcaaaagacaaagcggatctcagcaaagaagagagatgtgcagcagcagatcgcgcaggcgcagcagggagaaggggggctgcctgaccgaggccacgaggagctgcggaagctggagagcacactggatggcctggagcgcagccgggagaggcaggaacgccgcatccaggtcacattaagaaaatgggagcgatttgaaacaaacaaagaaacagtagtaagatacctttttcaaacaggttccagtcatgaacgcttcttgagttttagcagtttggaaagtttatcttcagaactggaacaaacaaaggagttttctaaacggacagaaagtattgcagtccaggctgagaaccttgtaaaggaagcttcagagataccgcttgggccccaaaataagcagctgcttcaacagcaggccaagtcaatcaaagaacaagtcaaaaaattagaagacacgcttgaagaagatattaaaaccatggaaatggtgaaaaccaagtgggatcattttggcagtaattttgagactctgtccgtctggataactgagaaagaaaaagaactcaatgccttggaaacttcgtcatctgccatggacatgcaaatcagccaaattaaggtcacaattcaggaaatagaaagtaagctcagcagcattgtaggattagaagaagaagcccagtcttttgctcagtttgttaccactggagaatctgctcgaattaaagccaagttgacacaaataagaagatacggggaagagcttcgagagcatgcacagtgtctggaaggaacaatcctgggacatttatctcagcagcaaaagtttgaagagaaccttagaaagatccagcaatctgtgtctgaatttgaagataaacttgctgttccaattaaaatatgttcttcagctacagaaacatacaaagttcttcaagaacatatggatctctgccaggccctggagtcactgagcagcgcgatcactgccttctcagccagtgccaggaaggttgtgaacagagattcctgtgttcaggaggctgcggctctacagcagcaatacgaggacatcctaaggagggcgaaggagagacagacggcgctggagaatctgctggcccactggcagaggctagagaaagaactatcatcctttttgacctggttagagcggggtgaagctaaagccagttccccagaaatggacatttctgcagacagagtcaaagtggaaggtgaacttcagttaatacaggcactgcaaaatgaagttgtatcccaggcctcattctatagcaaacttttgcaattgaaggaatcattgttctcagtagcctccaaagatgatgtgaaaatgatgaaactacatttggagcagttggatgagagatggagagatttaccacagatcattaacaaaaggattaattttcttcagtctgtggttgctgaacaccagcaatttgatgagctgctgctttccttttctgtctggattaaactgtttctcagtgaattacaaactacctctgagattagcataatggaccatcaagtagcccttactcggcataaggaccacgcagcagaagtagagagcaaaaagggcgaattgcagagtctgcagggtcacttagcaaagttgggttctctgggccgtgctgaggacctccacctcctgcagggaaaggctgaggactgcttccagctgtttgaggaggccagccaggttgtggagaggcggcagcttgccctgtcccatttggcagaattcctccagagccatgcctctctgtccggcattctccgccagctgaggcaaacagtggaagcaaccaacagtatgaataagaacgagtctgatttgatagaaaaggacctcaatgatgctcttcaaaatgctaaagcattagaatctgctgccgtcagtctggatggcattctttccaaagcccaataccatctgaaaatcgggagctctgagcaaaggacttcctgcagagccacggctgatcagctctgtggagaggtagagaggatccagaaccttctgggaaccaagcagagtgaggcagatgctctggcagtgttgaaaaaagcattccaagaccagaaagaggagcttctgaaaagcattgaggacattgaagaaaggactgacaaagagcgattgaaagaacctacccgccaagctcttcagcagaggttaagagtgtttaatcagctagaagatgaattgaattctcacgagcatgaactatgttggttgaaagacaaagccaagcaaattgcccagaaagatgtagcttttgcacctgaagttgacagggagataaaccgcttagaggtcacctgggatgataccaaaagactaattcatgaaaatcagggtcagtgctgtggacttattgacttaatgagagaatatcagaacctgaaatcagctgtatctaaagtcttagaaaatgccagcagtgtgattgtaaccagaactaccataaaagatcaggaggatcttaaatgggctttttccaagcatgaaactgccaagaacaaaatgaattacaaacagaaagacttggataactttaccagcaaaggaaaacacttgttatctgagctgaagaaaattcacagtagtgatttcagcttggtgaaaacagacatggagagcaccgtggacaaatggctggatgtatcagagaaacttgaagaaaacatggataggctgagagtaagcctgtccatttgggatgatgtactgtcaactagagatgagattgagggatggtcaaacaactgcgttccacagatggcagaaaacatcagcaacctggataaccacctcagagctgaagaactgcttaaagaatttgagtctgaagttaaaaacaaagcattgagattggaagaactgcattccaaagttaatgatctgaaagaattaactaaaaatctagaaacaccgccagaccttcagtttatagaagcagacttaatgcagaaactggagcatgccaaagaaataactgaagtagcaaaaggaaccctgaaggatttcacggctcaaagtacacaagtggagaagtttattaatgacataacaacatggttcacaaaagtggaagaatcgttgatgaactgtgcccaaaatgagacttgtgaagcattgaaaaaagtcaaggatatacaaaaagaacttcaaagtcaacaaagcaacatcagctctacccaagaaaatctcaatagcttgtgccgcaagtaccactcagctgagttggagagcctgggccgtgcaatgactggtctgataaagaaacatgaagccgtgagccagttgtgctccaaaacccaggccagcctgcaggaatctctggaaaaacacttcagtgagtctatgcaggaattccaagaatggtttttgggagcaaaggcagcagcaaaagaatcatcagatcgcaccggtgacagcaaagttctagaagcaaagctccatgatcttcagaacattttggactcagtcagtgatgggcagagcaaacttgatgcagtgactcaagaaggacaaactttgtatgcacatttgtctaaacaaattgtcagtagcattcaagaacaaatcacaaaggccaatgaagagtttcaagcatttctgaaacaatgccttaaagataagcaggctcttcaagactgtgcttcagaacttggaagctttgaagatcagcacagaaaactgaacttatggatccatgaaatggaagaaaggttcaatacggaaaacttgggagagagtaaacagcacattcctgagaagaaaaatgaagttcataaagttgaaatgtttttgggagaactgctggctgcaagagagtctcttgataagctttcccagagagggcagcttctgagtgaagaaggccacggtgctgggcaggagggccgcctgtgttcccagctcctcacaagccaccagaacctacttagaatgaccaaagagaaactccggagctgccaggtggcccttcaggagcacgaagccctggaggaagcactgcaaagcatgtggttctgggtgaaggccattcaggacagactggcctgtgcagagagcactcttgggagcaaagacaccctggagaaacggctgtcacaaatacaggatattctcctgatgaaaggtgaaggggaagttaagttgaatatggccattggcaagggggaacaggccttgagaagtagcaacaaagaaggtcagagggtgattcagactcagttagagacccttaaagaagtgtgggctgacatcatgagctcctccgtccacgctcaaagcactttagagtctgtgattagccaatggaatgactatgtagagaggaaaaaccagttggagcagtggatggaatcagtggatcaaaaaatagaacatcccttacaaccacagccaggtctgaaagagaagttcgtcctgcttgaccacctccagtccatcctgtctgaggcagaagatcacacgagagcccttcaccgtctaattgcgaagtccagggagctctacgaaaagacagaggatgagtctttcaaggacacagctcaagaggagctgaaaacacagtttaatgatataatgactgttgccaaggaaaaaatgaggaaagtggaagagattgtgaaagatcatctaatgtatttagatgcggtccacgagttcacagattggctccattcagcaaaggaagaacttcaccggtggtcagatatgtctggagattcatcagccacccagaaaaagttatcaaaaattaaggagctgatagattccagagagattggtgcaagccgtctcagcagagtggagtcgctggctcccgaagtgaaacagaacacaactgccagtgggtgtgagctcatgcacacggagatgcaggccctgcgtgccgactggaagcagtgggaagacagtgtattccaaacgcagagctgtttggagaacctggtcagccagatggccctttcggagcaggaattctcaggccaagtggctcaactggagcaggccctggaacagttcagtgcccttctgaaaacctgggctcagcagttaaccctcctggaaggcaagaacacggatgaggagatagtggaatgctggcacaaaggacaagagatactggatgctttgcaaaaagcagagcctagaacagaggatctcaagtctcagctgaatgaactttgtcgattttccagagacctgagtacctacagtggaaaagtttctggcttgattaaagagtataattgtctttgtttgcaagcatccaagggctgccagaataaagaacagattttacagcaaagatttcgaaaggccttcagggatttccagcagtggttggttaatgcaaaaatcactaccgccaagtgttttgatatacctcaaaatataagtgaagtttcaactagtcttcagaaaatacaggagtttttgtcagaaagtgaaaatggacagcacaagctaaacatgatgctgtctaaaggggaacttctgagtaccctgctgaccaaagagaaagcgaaagggatccaggccaaagttacagctgcaaaagaagattggaaaaattttcattcaaatctccaccaaaaagaatctgctctagagaatctaaagatccaaatgaaggactttgaagtaagtgctgagcctatccaggactggctgagtaaaactgagaagatggtccatgaaagcagcaatcgcctctatgatctgccagcaaagaggagggagcagcagaagctccagtctgtccttgaggaaatacactgctacgagcctcagctcaacaggctgaaagagaaagctcagcagctgtgggaaggacaagctgccagcaagagctttaggcacagagtgtcgcagctgtcttctcagtatctagcgctaagcaatttaacaaaggagaaagtgtcaagactggatagaatcgttgcagaacacaatcagttctctcttgggattaaagaattacaagactggatgacggatgcgattcacatgctggattcatactgccacccgacatccgacaaaagtgtgctggacagcaggacgctcaagctcgaggctctattatcagtcaaacaggaaaaagagattcagatgaaaatgatagtgaccaggggagaatctgtccttcagaatacttctccagaaggcattcccactattcagcagcagctgcagagtgtgaaggatatgtgggcatcccttttgtctgcagggattcgttgtaaaagccaactcgaaggagctctctccaagtggacaagttatcaggatggcgttcgacagttctccggttggatggatagtatggaagccaacctgaatgaatcagaaaggcagcatgcggagctgcgggataaaacaacgatgctcggaaaagccaagttattaaatgaagaagtgctgagttacagcagcttgctggagaccatcgaagtcaaaggggctggcatgacagaacactatgtcacccagctagaactccaggatctacaggaacgatacagagccatccaagagagggccaaggaagccgtaaccaagtctgaaaaacttgtccgcctgcaccaagagtatcagagagacctaaaggcatttgaagtttggttggggcaagaacaagaaaagctcgaccagtattcagttcttgaaggtgatgcccacactcatgagacaacattgcgtgatcttcaggagctacaggtacactgtgcagaggggcaggccctgttgaactcagtgctgcacaccagagaggatgtgatcccatcaggtatcccacaggcagaggaccgggctttagagtctctccggcaagactggcaggcttaccagcacaggctgtccgagactcgaactcagttcaataacgtggtgaacaaattgaggctaatggagcaaaagtttcagcaagtagatgaatggctcaaaacagcagaggagaaaaagtggcacgaagaagtgactgcatacagagatgaagttgaggaagtgggagctagagctcaggagatactggacgagagccacgtgaacagcagaatgggttgccaggccacccagctgacttccagataccaggccctgcttctccaagtgctggaacaaataaaattcctggaggaggagattcagagtttggaggaatcagaatcatccctcagttcctattctgattggtatggctctactcataaaaacttcaagaatgtggctaccaagattgacaaagtagatacagtaatgatggggaagaaattgaagacgttggaggttttgctcaaagacatggagaaaggtcacagtttgctgaaatcagcccgggagaaaggagagagggctgttaaatacttggaggaaggcgaggcagagaggttaagaaaggagattcatgatcacatggagcagttgaaggaactgaccagcactgtccggaaagaacacatgacgctggaaaaaggtcttcatttagcaaaggaattctcagataaatgcaaagcactgacacagtggatagcagaataccaggaaattctacatgttcctgaagaacccaaaatggaattatatgagaaaaaagctcagttatctaaatacaagtcacttcaacaaacggtgctgtcccatgaaccatcagtaaagtcagtgagagagaagggtgaagctcttttggaactggtgcaggacgtcactttaaaggacaaaatagatcaacttcaaagtgattaccaggacctgtgcagcataggaaaggcaatgatggaagaaattgctggttttgaagaccgtttgaacaatcttcaaatgaaaggtgatactttgattggccaatgtgcagaccacctgcaagcgaaacttaaacaaaacgtgcatgctcatctgcagggcacaaaggacagctactcagcgatctgcagcacagctcagaggatgtaccagagtttggaacacgaacttcagaagcacgtcagccgacaagacaccctgcagcagtgccaggcctggctttctgcagtccagccggatttagagccaagtcctcaaccacctcttagtagggcagaagccattaagcaggtcaaacacttcagagctttgcaagagcaggcaaggacctacctagatctcctttgctccatgtgtgacctgtcaaatgcttcggtgaaaaccacagcaaaagacattcaacaaacagagcaaacgattgaacaaaagcttgtccaggcccagaacttaactcagggctgggaagagatcaagcacctgaagtctgagctctggatttacctgcaagatgctgatcagcaactgcagaacatgaagaggaggcactctgagctggagctgaacattgcacagaacatggtttcacaagttaaggattttgttaagaaactacagagcaaacaggcatccgtgaacaccataatagaaaaggtgaataagttaacaaagaaggaggaatcgcctgaacacaaggaaataaatcatttaaatgatcagtggctcgatttgtgccgtcagtctaacaacctgtgcttgcaaagggaagaggatcttcagagaacaagagattaccatgactgtatgaatgttgttgaagtgttcctagaaaaatttactacagaatgggataacttggccagatctgatgcagagagtacagctgtccacctggaagctttgaaaaagttagcattggcattgcaggagagaaagtatgctattgaagatctgaaagatcaaaagcagaaaatgatagagcatctgaatttagatgacaaggagttagtcaaagaacagacgagtcatttagagcaacgttggtttcagcttgaggacctcattaaaaggaaaatccaagtgtcagtcaccaacttggaggagttaaatgtggtgcagtccagatttcaggagctaatggagtgggcagaagagcaacaacccaacatcgccgaggcccttaagcagagccctcctccagatatggctcagaaccttctcatggatcacctggccatctgcagtgaactggaggccaagcagatgctcctgaaatcgcttataaaggacgcagacagggtcatggcagatcttggtctcaatgagcgacaggtcatccagaaggctctctctgatgcacaaagccacgtgaattgtctcagtgacttagtgggccagcgaagaaagtacttaaacaaagccttgtccgagaaaacccagtttctcatggcagtgttccaggccaccagccaaattcagcaacatgagcgaaagataatgttccgtgaacacatctgtctgttaccagatgatgtgagcaaacaagtcaaaacatgtaagagtgcacaagccagcctcaagacttaccaaaatgaagtcactggactttgggcccagggtcgcgaactaatgaaggaagtcacagagcaggaaaagagtgaagtgctggggaagcttcaggaattgcagagtgtctatgacagtgttttacaaaagtgcagtcaccggttacaagaactagagaagaatttggtttctaggaagcattttaaggaagattttgataaagcttgccactggctaaaacaagcagatattgttacatttcctgaaatcaacctaatgaatgagagttctgagcttcatacacaactggctaaataccaaaacattcttgaacaatctccagaatatgaaaatcttctacttacgctgcagagaactgggcagaccatattaccatcgctgaatgaagtcgatcattcctacctcagtgaaaagctaaatgctttgcctcgacaatttaatgtaattgttgccttggctaaagacaagttctataaagtccaggaagcaattcttgctcggaaggaatatgcttccttgattgagttgacaacccagtctctgagtgaacttgaagcccaattcttgaggatgagcaaagttcccaccgacctggccgttgaggaggctctttctctgcaagatggttgcagagccattctggacgaggtggcgggccttggggaggcggtggatgaactgaaccagaaaaaagaaggttttcgcagcacaggtcagccttggcagccagacaagatgctgcaccttgtcaccttatatcacaggctgaagcgacaaacagaacagagggttagcttattagaagacaccaccagtgcttaccaagaacacgagaagatgtgccaacagctggagagacaactgaagtctgtaaaagaggagcagtccaaagtgaatgaggaaacgctgcctgcagaggagaagctcaaaatgtatcactccctggcaggaagtctccaggactcagggattgtactgaaacgagtaaccatacatcttgaagatcttgccccacaccttgaccccttggcttatgagaaagccaggcatcagatccagtcctggcaaggggagttaaaactgttgacttctgccattggtgagacggtgacagaatgtgagagccgaatggtgcagagtatagacttccagactgagatgagtcgctccctggactggctgaggagagtgaaggcagagctcagtgggccggtgtacctagacctcaacctgcaggacatccaagaggaaatcagaaaaatccaaattcatcaggaagaggtccagtccagcttgagaatcatgaatgcgctgagtcacaaggaaaaggagaagttcacaaaggccaaggagctgatttctgcggatttagaacacagcctcgctgagctctcagagctggatggagacatccaggaagccttacgcaccagacaggctaccttgactgaaatatatagccagtgtcaaaggtattatcaggtatttcaagcagccaatgactggcttgaggatgcccaagaattgttacagctggcaggcaatggcctagacgtggagagcgcagaggaaaatctcaaaagccacatggaatttttcagtacagaggatcagttccatagtaacctggaggagctccacagcctggtagccaccctggacccactcatcaagccaaccggcaaagaagacctagaacagaaagtggcttctctggaactcaggagccagaggatgagccgggactctggtgcccaagtggatctcttgcagagatgcacagctcaatggcacgattaccagaaagcaagggaagaggttattgaattgatgaatgatacagaaaagaaattgtctgagttttctttgttgaagacttcgtctagtcatgaagcggaagaaaaattgtcagaacacaaggctttagtgtcagtggttaactctttccatgagaaaattgtggcccttgaggaaaaagcttcacaactggagaaaaccggaaatgatgccagcaaagccaccctgagcaggtcaatgaccaccgtctggcagcgctggacacgccttcgagctgtggcccaggaccaggagaagatcctggaagatgcagtggatgagtggacgggctttaacaacaaggttaaaaaggccactgaaatgattgatcagctgcaagataagttacctggaagttcagcagagaaagcatcgaaagcagagctcttaactcttcttgaataccacgacacgttcgttctggagctggagcagcagcagtcggccttgggcatgctgcggcagcaaaccctgagcatgctccaggatggagccgccccaacccctggggaagagcctccgctcatgcaggaaatcaccgccatgcaagatcggtgcctgaacatgcaggagaaagtgaagactaatggaaagttggtgaagcaagagctgaaggaccgagaaatggtggagactcagatcaattctgtgaaatgttgggttcaggaaacgaaagaatatttagggaatccaacaatagaaatagatgctcaacttgaagaacttcagattctcctaacagaagccacaaatcaccgacagaacattgaaaaaatggcagaagaacagaaggagaagtacttaggtctttataccatattaccttctgaactctcccttcagttggctgaagtggcgttagatctaaagatccgagatcagatccaagacaaaataaaagaagttgagcagagcaaggccacgagccaggaactcagccggcaaattcagaagttagctaaagacctcacaactattctaactaagctgaaagcgaagacagataatgtagttcaagctaaaactgaccaaaaggtgctgggagaggaattagatggctgtaattcaaagttaatggaattagatgcagcagtacagaaattcttggaacagaatggccaactgggtaagccactggccaagaagataggaaaactgactgaacttcaccagcagaccattagacaagctgagaatcggctctccaagctcaatcaggcagcatcacatttagaagaatacaatgaaatgcttgaattaattttgaagtggattgaaaaagctaaagtcttggctcatggaactattgcatggaattctgcaagccagcttcgggaacaatatattttgcatcagaccctgctagaagaatccaaagaaattgacagtgagctggaagcaatgactgagaaattacagtacctcactagcgtgtactgtacagaaaaaatgtctcagcaagtggcagaactgggacgggagactgaggagttgcgacagatgatcaaaattcgtttgcagaacctccaagatgcagctaaggatatgaaaaaatttgaagcagagttgaaaaagttacaagctgccttggagcaagcccaggcaacactgacttctccagaagttggacgtctcagtctcaaggagcagctctctcatcggcagcatttgttgtctgagatggagtcactgaagccgaaggtgcaagcagtgcagctctgccagagtgccctccggatccccgaggatgtggttgccagcttacctctctgtcatgctgctctgcggctgcaggaagaggccagccggctgcagcacaccgccatccagcagtgtaacatcatgcaggcagctgtggtacaatatgaacaatatgagcaagaaatgaaacatctccagcaactgatagaaggagctcacagagagattgaggataaacctgttgccaccagtaacatacaggagctgcaggctcagatttctcggcatgaggagctggcgcagaaaattaagggctaccaggagcagatcgcttctttgaattccaagtgcaagatgctgacgatgaaagccaagcacgccaccatgctgctgacggtgaccgaggtcgaggggctggcggaagggacagaggacctggatggggagctcctccccacgccttcggcccacccctctgtggtcatgatgactgcaggtcgctgtcacactttgctgtcaccggtcactgaggagtctggggaggagggaaccaacagtgagatttcctctccacctgcctgtcgctccccttcacctgtggctaatacagatgcttctgttaaccaggacattgcatattaccaagccttgtctgctgagaggttgcagacagatgctgcaaaaattcaccccagcacatccgcatcccaggagttctatgaaccgggattggagccatccgctactgccaaactgggtgatttgcagcgttcttgggaaaccttaaagaatgtgatcagtgagaagcagcgcacactctatgaagctttggaacgccagcagaagtaccaggactccctccagtccatctctacgaagatggaggccattgagctgaaactcagtgagagcccagagcctggcaggagtccagaaagccagatggctgaacatcaggcattgatggatgagattctcatgctccaggatgaaatcaatgagctccagtcctctctcgcagaggagctggtatccgagtcttgtgaggccgaccctgcggagcagctggccttgcagtccacgctcactgtcttagccgagcgaatgtccaccatcaggatgaaagcctcggggaaacggcagcttttggaggagaagttgaatgatcagctggaggaacaaaggcaggaacaggccctgcagaggtatcgctgtgaagccgatgagctggacagctggctcttgagtaccaaggccactctggacactgcgctgagtccacccaaggagcccatggacatggaggcccagcttatggactgccagaatatgctggtggaaatagagcagaaggtggtggctttatcagaactgtcagtccacaatgagaacctgctgctggagggcaaagctcacaccaaggacgaggccgagcagctggctggaaagctgagaaggctcaaggggagcctgctggagctgcagagagccctgcatgataagcagctcaacatgcagggaacagcacaggagaaggaggagagcgatgttgacctaacagccacgcagagccccggcgtccaggaatggctggcccaagctcgcaccacatggacccagcagcggcagagcagtctccagcaacaaaaagagttagaacaggaattagccgagcagaagagtctccttcgctcagtagccagtcgtggagaggagattctaattcaacattcggcggcagagacctctggtgatgctggcgaaaaacctgatgtgttatcccaggagttggggatggaaggggagaaatcatccgctgaagaccagatgagaatgaaatgggaaagcctacatcaagaatttagtaccaagcagaaactactacagaatgttctggaacaggaacaagagcaagtgctttatagcaggccaaatcgactcttgtctggtgtgccactgtacaaaggggacgtgccaacccaagataaatctgcagttacatctttgctggatggactgaaccaagccttcgaggaggtttcatcccagagtggaggggcaaagaggcagagtatacacttggagcagaagttgtatgatggagtctcagccacctctacttggttggatgacgttgaagaacgtttatttgttgccacagcacttttaccagaagaaacagagacttgtctcttcaaccaagagattcttgccaaagacattaaggaaatgtctgaagaaatggataagaacaaaaacttgttttcccaagcttttccagagaatggtgataatcgagatgttattgaagatactttgggttgtcttttgggcaggttatccttgctagactcagtagtgaatcaacgatgtcatcagatgaaagaaagacttcagcaaatactaaatttccagaatgatctgaaagtgctgtttacatcactggctgacaacaaatacatcattctgcaaaaactggcaaatgtgtttgaacagcccgtagcagaacaaatagaggcaatacaacaggctgaagatggactcaaagaatttgatgcaggaatcattgaattaaagaggcgtggtgacaagctacaggtcgagcagccgtccatgcaagaactctccaagctccaggacatgtatgatgagctgatgatgatcattggctcccggaggagtggtctgaatcagaaccttacactcaagagtcagtatgagagggccctacaagatctggctgacctgctagaaactggtcaggagaagatggcaggagaccagaaaatcatcgtgtcttccaaagaggaaatccagcaactacttgacaaacataaggaatactttcagggcctggaatctcatatgatcttgactgaaacactcttcagaaagataatcagctttgcagtccaaaaggaaacccagttccatacagagctgatggctcaggcttctgctgtactgaaacgggctcacaagaggggtgtggagctggagtacattctagagacgtggtcccatctggatgaggaccagcaggagctcagcagacagctggaggtggtggaaagcagcatcccaagcgtgggtctggtggaggagaacgaggacaggcttattgaccgcataacactctaccagcatttaaaatctagccttaatgaataccagcccaaattatatcaagtattagatgatgggaaacgacttctgatatccatcagctgctcagatctagaaagccaactaaatcaacttggagagtgctggctaagtaacaccaataaaatgtctaaggaacttcacagactggaaacaatattgaaacactggaccagatatcaaagtgaatctgcagatctaattcactggttacaatctgcaaaagaccggctagaattttggactcagcaatctgtgacagtcccacaagagctggaaatggtccgtgatcatctaaatgctttcctggagttttctaaagaagtggatgcccaatcttccctgaaatcatctgttctgagtactggaaatcagctccttcgactaaaaaaggtggacacagccacgctgcgctctgagctgtcgcgcattgatagccagtggactgacctgctaaccaatatcccagccgtccaggagaagctccaccagctccagatggataaactgccttcccgccatgccatttctgaagtcatgagttggatttctctaatggaaaatgttattcagaaggatgaagataatattaaaaattccataggttacaaggcaattcatgaataccttcagaaatataagggttttaagatagacattaactgtaaacagctgacagtggattttgtgaaccagtccgtgctacaaatcagcagtcaggatgtggaaagtaagcgtagtgataagactgattttgctgagcaacttggagcaatgaataaaagttggcaaattctgcaaggtctagtaactgagaagatccagctgttggaaggcttattggaatcttggtcagaatatgaaaataatgtacaatgtctgaaaacatggtttgaaacccaggaaaagagactaaaacaacagcatcgaattggagatcaggcttctgttcaaaatgcactgaaagactgtcaggatctggaagatttgattaaagcaaaagaaaaagaagtagagaaaattgagcagaatggacttgctttgattcagaacaagaaagaagacgtctctagcattgtcatgagcacactgcgagagctcggccaaacctgggcaaatttagatcacatggttggacaattaaagatactgctgaaatcagtgcttgaccaatggagtagtcacaaagtggcctttgacaagataaacagttacctcatggaggccagatactctctttcccgattccgtctgctgactggctccttagaagctgtgcaagttcaggtggacaatcttcagaatctccaagatgatctggaaaaacaggaaaggagcttacagaaatttggctctatcaccaaccaattattaaaagagtgtcacccacccgtgacagaaactcttaccaatacactgaaagaagtcaacatgagatggaataacttgctggaagagattgctgagcagctacagtccagcaaggccctacttcagctttggcaaagatacaaggactactccaaacagtgtgcttcgacagttcagcagcaggaggatcgaaccaatgagctgttgaaggcagccacaaacaaggacattgccgatgatgaggttgccacatggattcaagattgcaacgacctcctcaaaggactgggcacagttaaagattccctcttttttctccatgagctgggagagcaactgaagcaacaagtggatgcttccgcagcatcagctattcaatcggatcaactctctttgagtcaacacttgtgtgccctggagcaagctctctgcaaacagcagacttcattacaggctggagttcttgattatgaaacctttgccaagagtttagaagctttggaggcctggatagtggaagctgaagaaatactacaagggcaggaccctagccactcatctgacctctccacaatccaggaaaggatggaagaacttaagggacagatgttaaaattcagcagcatggctccagatttagaccgtctaaatgagcttggatataggttacccttgaatgataaggaaatcaaaagaatgcagaatctgaaccgccattggtctctgatctcctctcagactacagaaagattcagcaagttgcagtcatttttgctacaacatcagactttcttggaaaaatgtgaaacatggatggaattcctagttcagacagaacaaaagttagcagtagagatttcaggaaattatcagcaccttttggaacagcagagagcacacgagttgtttcaagccgagatgttcagtcgtcagcagattttgcactcaatcattattgatgggcaacgtcttctagaacaaggtcaagttgatgacagggatgaattcaacctgaaattgacactcctcagtaatcaatggcagggagtgattcgcagggcccagcagaggcgggggatcattgacagccagattcgccagtggcagcgctatagggagatggcagaaaagcttcgtaaatggttggttgaagtgtcctacctccccatgagtggtctcggaagtgttcctataccactgcaacaagcaaggaccctctttgatgaagtgcagttcaaagaaaaagtgtttctgcggcaacaaggcagctacatcctgactgtggaggctggcaagcaactccttctctcggcggacagtggcgctgaggccgccttgcaggccgaactcgctgaaatccaagagaaatggaaatcagccagcatgcggctggaagaacagaagaaaaaactagccttcttgttgaaagactgggaaaaatgtgagaaaggaatagcagattccctggagaaactacgaactttcaaaaagaagctttcgcagtctctcccggatcaccatgaagagctccatgcagaacaaatgcgttgcaaggaattagaaaatgcagttgggagctggacagatgacttgacccagttgagcctgctgaaggacaccctctctgcctatatcagtgctgatgatatctccattcttaatgaacgcgtagagcttctgcaaaggcagtgggaagaactatgccaccagctctccttaaggcggcagcaaataggtgaaagattgaatgaatgggcagtcttcagtgaaaagaacaaggaactctgtgagtggttgactcaaatggaaagcaaagtttctcagaatggagacattctcattgaagaaatgatagagaagctcaagaaggattatcaagaggaaattgctattgctcaagagaacaaaatacagctccaacaaatgggagaacgacttgctaaagccagccatgaaagcaaagcatctgagattgaatacaagctgggaaaggtcaacgaccggtggcagcatctcctggacctcattgcagccagggtgaagaagctgaaggagaccctggtagccgtgcagcagcttgataagaacatgagcagcctgaggacctggctcgctcacatcgagtcagagctggccaagccaatagtctacgattcctgtaactcggaagaaatacagagaaagcttaatgagcagcaggagcttcagagagacatagagaagcacagtacaggtgttgcatctgtcctcaacctgtgtgaagtcctgctgcacgactgtgacgcctgtgccactgatgccgagtgtgactctatacagcaggctacgagaaacctggaccggcggtggagaaacatttgtgctatgtccatggaaaggaggctgaaaatcgaagagacgtggcgattgtggcagaaatttctggatgactattcacgttttgaagattggctgaagtcttcagaaaggacagctgcttttcccagctcttctggggtgatctatacagttgccaaggaagaactaaagaaatttgaggctttccagcgacaggtccacgagtgcctgacgcagctggaactgatcaacaagcagtaccgccgcctggccagggagaaccgcactgattcagcatgtagcctcaaacagatggttcacgaaggcaaccagagatgggacaacctgcaaaagcgtgtcacctccatcttgcgcagactcaagcattttattggccagcgtgaggagtttgagactgcgcgggacagcattctggtctggctcacagagatggatctgcagctcactaatattgaacatttttctgagtgtgatgttcaagctaaaataaagcaactcaaggccttccagcaggaaatttcactgaaccacaataagattgagcagataattgcccaaggagaacagctgatagaaaagagtgagcccttggatgcagcgatcatcgaggaggaactagatgagctccgacggtactgccaggaggtcttcgggcgtgtggaaagataccataagaaactgatccgcctgcctctcccagacgatgagcacgacctctcagacagggagctggagctggaagactctgcagctctgtcggacctgcactggcacgaccgctctgcagacagcctgctttctccacagccttcctccaatctctccctctcgctcgctcagcccctccggagcgagcggtcaggacgagacaccccggctagtgtggactccatccccctggagtgggatcacgactatgacctcagtcgggacctggagtctgcaatgtccagagctctgccctctgaggatgaagaaggtcaggatgacaaagatttctacctccggggagctgttggcttatcagatgtaatgatccccgaaagccctgaggcctatgtaaaactcacagaaaatgcaatcaaaaatacctccggggaccacagtgccctagagtcacagatccgacaactgggcaaagccctggatgatagccgttttcagatacagcaaaccgaaaatatcattcgcagcaaaactcccacggggccggagctagacaccagctacaaaggctacatgaaactgctgggcgaatgcagtagcagtatagactccgtgaagagactggagcacaaactgaaggaggaagaggagagccttcctggctttgttaacctgcatagtaccgaaacccaaacggctggtgtgattgaccgatgggagcttctccaggcccaggcattgagcaaggagttgaggatgaagcagaacctccagaagtggcagcagtttaactcagacttgaacagcatctgggcctggctgggggacacggaggaggagttggaacagctccagcgtctggaactcagcactgacatccagaccatcgagctccagatcaaaaagctcaaggagctccagaaagctgtggaccaccgcaaagccatcatcctctccatcaatctctgcagccctgagttcacccaggctgacagcaaggagagccgggacctgcaggatcgcttgtcgcagatgaatgggcgctgggaccgagtgtgctctctgctggaggagtggcggggcctgctgcaggatgccctgatgcagtgccagggtttccatgaaatgagccatggtttgcttcttatgctggagaacattgacagaaggaaaaatgaaattgtccctattgattctaaccttgatgcagagatacttcaggaccatcacaaacagcttatgcaaataaagcatgagctgttggaatcccaactcagagtagcctctttgcaagacatgtcttgccaactactggtgaatgctgaaggaacagactgtttagaagccaaagaaaaagtccatgttattggaaatcggctcaaacttctcttgaaggaggtcagtcgtcatatcaaggaactggagaagttattagacgtgtcaagtagtcagcaggatttgtcttcctggtcttctgctgatgaactggacacctcagggtctgtgagtcccacatcaggaaggagcaccccaaacagacagaaaacgccacgaggcaagtgtagtctctcacagcctggaccctctgtcagcagtccacatagcaggtccacaaaaggtggctccgattcctccctttctgagccagggccaggtcggtccggccgcggcttcctgttcagagtcctccgagcagctcttccccttcagcttctcctgctcctcctcatcgggcttgcctgccttgtaccaatgtcagaggaagactacagctgtgccctctccaacaactttgcccggtcattccaccccatgctcagatacacgaatggccctcctccactctgaactaagcagatgccatctgcagaagtgctggtagcataaggaggatcgggtcataagcaatcccaaactaccaacaagaggaccttgatcttggcgaaagccctcggtgtggcagctttagccctcctccagatcacatgtgtgcaaattatggcttcagaggtggaagataaacagtgacgggggaacaaacagacaacaagaaggtttggaagaaatctggtttgagactctgaaccttagcactaaggagattgagtaaggacctccaaagttccccggactcatgaattctgggcccttggcccattctgtgcacagccaaggacttcagtagaccatctgggcagctttcccatggtgctgctccaaccatcagataaatgaccctcccaagcaccatgtcagtgtcgtacaatctaccaaccaaccagtgctgaagagattttagaaccttgtaacatacaatttttaagagcttatatggcagcttcctttttaccttgttttcctttggggcatgatgttttaacctttgctttagaagcacaagctgtaaatctaaaaggcacttttttttagaggtataaagaaaaactagatgtaataaataagatcatggaaggctttatgtgaaaaaagttgaatgttatagtaaaaaaaaaaagatatttatgtatgtacagtttgctaaagccaagttttgtttgtattgatttctttgcatttattatagatattataaaat

SEQ ID NO: 311 - DNA, 3680 bp, Homo sapiens
tcaaccctgcttggttttagaggattgctcccgtgggtcacttgaggcaggctccaccttccccaggaggagtggcagagtccagccagcgctcggagctggaggcccacgtgggagcagtgagcggctctgagatgccgcggcagtttcccaagctgaacatctctgaagtggatgagcaagtccggctcctggcggagaaggtgtttgctaaagtgctccgagaagaggacagcaaagatgccctgtccctgttcactgtcccagaggactgccccatcgggcaaaaggaagccaaggagagggagctgcagaaggagctggcagagcagaagtctgtggagaccgcaaaaagaaagaaaagtttcaagatgattcggtcccagtccctgtctctgcaaatgccgccacagcaagattggaagggccccccggcagccagtccggccatgtctcccacaacccctgtggtcactggagccacttccctgcccacgccagcaccctatgccatgcctgagttccagcgggtcaccatcagcggagattactgtgccgggatcactttggaggactatgagcaggcagccaagagtctggccaaggccctaatgatccgggagaagtatgcgcggctcgcctaccaccgcttcccgcggatcacatcccagtacctgggtcatccgcgggcggatactgcacctccggaagagggccttccagacttccaccctcctccactgccccaggaagacccctactgcctggatgatgcaccccccaacctggattacttggtccacatgcaggggggcatcctctttgtgtatgataacaagaagatgctggagcaccaggagccgcacagcctaccctaccccgacctggagacctacacggtggacatgagccacatcctggctctcatcaccgatggccccacgaaaacctattgtcaccggcgactgaactttctggaatccaagttcagccttcatgagatgttaaacgaaatgtccgagttcaaagagttgaagagtaacccccaccgggacttctataacgtgagaaaggtggacacacacatccatgcggccgcctgcatgaaccaaaagcatctgctgcgcttcatcaagcacacataccagacggagcctgacaggactgtggcagagaagcggggccggaagatcaccctgcggcaggtgtttgacggcctgcacatggacccctacgacctcactgtggactcactggatgtccacgcgggccggcagacattccaccgctttgacaagttcaactccaaatacaaccctgtgggggccagtgagctgcgtgacctgtatttgaaaactgaaaactatctgggaggagagtactttgctcggatggtcaaggaggttgcccgggagctggaggagagcaagtaccagtactcagagccacggctctccatctacggccgcagtcctgaggagtggcccaacctggcctactggttcatccagcacaaggtctactctcccaacatgcgctggatcatccaggtgccccggatttatgacatatttaggtcaaagaagctgctgccaaactttgggaagatgctggagaacatcttcctgccccttttcaaggccactatcaacccccaagatcatcgagagcttcacctcttccttaaatatgtgacggggtttgacagcgtggatgatgagtccaagcacagcgaccacatgttttccgacaagagcccaaacccggacgtctggaccagtgagcagaacccaccctacagctactacctgtactacatgtatgccaacatcatggtgctcaacaacctccgcagggagcgcggcctgagcacgttcctgttccggccgcactgtggggaagccggctccatcacccacctggtgtctgccttcctcactgctgacaacatttcccacgggctgctcctcaagaagagtccggtattgcagtatctctactaccttgctcagatccccattgccatgtctcctcttagcaacaacagtttgttcctcgaatattccaagaaccctctgagggaattcctacacaagggactgcatgtttctctttccaccgatgaccccatgcagttccactacacgaaggaagcacttatggaagaatatgccattgcagctcaagtgtggaagctgagcacctgcgacctgtgtgagatcgccaggaacagcgtgctgcagagcggcctctcgcatcaggaaaagcaaaagtttctgggacaaaattattataaagaaggacctgaaggaaatgatattcgaaagacaaatgtggctcagatccggatggcattccgatatgagaccttatgcaatgagctcagcttcctgtctgatgctatgaaatcagaagagatcaccgccttgaccaactaggtccagcatttgacatgcattttaactttttggttcaatttcaagtctgctgtggctaatagtggtcaagattccgaactaggactttcctctgtgaagaggatgcctctgaagaaattttaaactggtgattttggttgcactgctcactttaagagttaacatgctcacttgttagtatttctgagtaacaagatggtgacttctccttggggatctgggagctgagcacttgtctatacttgttcctaattttccaagtatttctcttgaaactgccagtgcctgaactgttggggccaggattttccctggtcagatgccaagtaacatgtggttttctgccatacttttctccattggcccaggtaggctaattggtagttgttcatttcagcctctggatggctggctggccttaaacacaatcaatttcaaagctccattttcataaaggggctactttgaaggagttaagatggaagacttccttcttgacaaattgtgtttttagtgaatttcttaaaccgttttatttagccctccttccctctttctagttggaagccaaatgtactcatgaaaacagccactcctattctgagtcttggtttcttcacctagaaagtgagggtttggactagatgagtggctttcagggtgttctgtgaatctcctcatgaatactttagggtgggggagggaagggagtgagtgatgctcaggggctgtcaaagtgactgcgttcatcagttttacactggggctgctacataatattttcatttgaacgaagaacttcaaaaagcacaggactagatgatctctgttccttttggctctaatatgctacaactgtaggccaattatcactttaccaattaagagttaggccagataagtgaaatttaacttaagggcacacagctaataagtaataggcctaaactggatttccttattccaaatcctgtcttttccccactattccattagaccccacaaatgttagttgtgtgtgtgtgtgtgtgtgtttttaatcactgtaaccgggtgcatttttttaaggcaaaatttctcccttatctactgtgatgacttcagaagatacaatggtcccaggggccaagtagaaagcatttttaaagattaatctgaattaagctttatcagtgtactctttatctgtgttactagtgcctggtatgtagtaggtgctcaataaatgcatattgaataact

SEQ ID NO: 312 - DNA, 18446 bp, Homo sapiens
cccaatttctttgctgagtcatagcaagggtgacctttgcccagttcccaacaaattccccatttccatctgagactttgtcaccctggacttcattgtccgtatcactatcagcattttggtcacaaccatttagccagtctctaagaagttccaaactttccctcatcttcttgttttcttctgagccctttaaattcttccaatctttgcccattacccagttccaaagttgactccacatttttagatatctttatagctatatgccccattcttcagtaccagttttctgtattaagccattcttttttttttctttttttcttttttttgagacggagtctcactctgtcgcccaggctggagtgcagtggtgcaatctcggctcactgcaagctccgcttcccgggttcatgccattctcctgcctcagcctccagagtagctgggactacaggcgcccaccaccacgcccgactaattttttgtatttttagtagagatggagtttcaccgtgttagccggtggtctcaatctcctgacctcatgttccaccccccctcagcctcccacagtgctgggattacaggcgtgagccaccatgcccagcctgtattaagccactcttatgttgctataaagaaatatctgaggctgggtaatttatatggaaatgaagtttattttggctcacagttctgcaggctgtacaagcatggcacccacatctgctcagcttttggcgaagccttaggaaactttcaatcatggcagagagcgaaggggagcagggatgtcacatgtcgaaagcagtaacaagagagcaatgggggagtgccacacacttttaaacaaccatatctcaggagaactcattcactattgagaggacagtaccaagctattcatgagggatctgcccccatgatccaaacacctcccaccaggccctacctccaacactggggattacatttcaacatgagatttggagggaacaaatacccagactacatcaatcacccatctccagagaaaaggaaaagggaatttagaaacaaaaaaaaaaagcacatccatcagagaacagatgagctaaggtgaagaggtaattgtagctaaatagaaatttgctgactgaacgtgaagctgtcccttcctgctatggacttcagattttagcccacttgaattgctccatatcctccaagccatggccatcccttgactctctgggctcccaagcacttgctgccttcatcacacagtttgagttaaggcagaaagactggtttccatgtacactttgtggaagctttctcatttctttatataatctctgtcctttgtctactgctttaaaatctagaaattgtttacaaacacaaaggtgatcctttaaaagctcaaagctgattgtgtcaccaatatataccactcttaatggcttcccattaaactttgagtaaagactttatggagcctacataaggccatgactacctggctcttattttcctcctcatcctcatctcaccaactcactctccactcctatacccctcactccttccccctcctctctctgagctccagactcccaattacctacttccaccctttttgacccccagggacttatctcagcctggaattttccctctttgctctccactgaactgtccactcccagtctaagacatgtgcttatgtcacacgcccttaccgtgcttatctcagtttgtaattatctactcatttagaaaagtgttgatgaaggtcttcactgtcagctttcaggatagcaggaatcatagctgattttacttacttaacggggtttcattctttgtaactttttttttttttgagatggagactcactcttgcccaggctggagtgcaatggcatgatctcggctcactgcaacctccacctcctgggttcaagtgattctcctgcttcagcctcccgagtagctgggattacagatgcctgtcaccacgcccagctaattttttgtattttttgtaaagacggggtttcatcatgttggccaggctggtctcgatctcctgacctcaggcgatccacccacctcagcctcccaaagtgctgtgattacaggcatgagccacggcacccagccactccttttttacttatgggtgagaagccattagagattatttcttcttttctttctctcttcactaaggcaccagggtcactaagtagtaggatactttgaactagaattcaagaaattgagttttaattttacctcacactctcatatgaattctccatgtgacctcgggccatacttcccctgtaccctgtttcctcttttataaaagtaagagtttaaactagatggtctccgacatgcatccttctctaacatattctgggaccttcaataaactaagataaagcagaataattaaaacttaatttaaaagaacacaggaaaggaagcagctacattaagcaaaagagacatcctcatggttgaagaagtgtatgccctggtgtctggatcccatttaggaaacttggtaaccttgcaatcttgggcagattgcttaatttctctagaccatgacttcctcttctgtaagatgtgataagaacatctacctcacaggtttcatgagaggattaaatgagataatgtattataatcccttgaacatggtaggctgttatgttaagtcctttcctccttctctgtagctatcatggaatttaaaaacacattataactagagcatgagttgcgactaaaggctcaattgtctctgcatgtgttggctcatgcatgctttattcctctgaagagcttttataccaagtgaaaggaaataattgcatttccctgaaaattcacaggaaaaagttatgtttttctcttcattcaagtgattctgttagacccaaccacatgcaacaattttaaagttgcttccaaatatatttacaaatatttcctgtcttcaaggaacaatggcaagaccatgactcaggttcacatccggattccaccactaaccatgtacccaattacttcagtcaccttcattcaggtcttacatatcacagaataaaatcagatttcatcagaggaggtgaagacagggagaggagatatttcaatcccttctccgcaacccccgttttttttttttttttaacaaggatcctagagttactgaatgatagcacgtttgagggggaaagaccctaaggatgatctttataagccatcacttggtgttggtggtgataagagactcgagtatctttatgcagtggaaagagaagattggactcggaatcagaagcttgagttcaagcactggtttcatcagtcttgtgatcttgggttggtcacttaacctcttcaagggtcctcagctgtgaaagaggatagtatcagctaattcttgtaggtgcagtgaggaggcagtgagatagtgcaggtaaactataaaacaattgtcacatgaaacgcatcacagtgattctttggacccacaagctccaatcttataaaacatatccagtcacccaccaacatagatcatctcaccttgcatatctgattttgtggatcatggggaaaaactgctgattcctagcaaaacccatggcataggataagtgcacaataatttttttttcctaaatgatttagatgacagtgactcattaagggtttcctgaggcctcctcagagtcgagaggtgggtgcctgaagccacccaaagtccctgtcacaggatggctcccaacgcacacaccacaggcctgcccagtatgttccactatctacccagtagagccctgcccagtacgttccactgtcccttccctagaagaggtgactgttgttcacagtcccagaaaagcgggctccccaaaacaatgcaaggacccacctctctctgaacctcacccaccctagttttcctttaaaaatcaatttacaagaagatcatgtgaaggaaaaggttgggtgatattctaacccaagttagctgtttctcaaccaagttctctttgaaaaattcaacaaccacctttggggaattatttacaacagaggagtgaggatgggaccaggataggtattgcctatgttggtggaaccagggtttttttcctggattaccaaagagatggtatgcattgctcccagaagctaaatatcttcaggctttcaatggtggccttcacctgaaaatgttatccctgttgaagctttcaagccagtattttcataagaactatattttctttggtgaactgaggcattataatgatgactatacaggttcttgagtgactgaagccatcattagcattgtcattatttttgtttagttgcatctccatagcagctcacattcacaatgtgctttgcaattgttccttagcaatagccctcacaagattctcaggaggagagggttaatcaggattaacatttctgtgttgcctaaagaggaaccaaggtaagcagaaatgtagccagttggctggcatcactgttgcttcaggattcatccttagacacccaagcttctaccctagtctggtgctacacttacattgcttacatccaagtgtggttatttctgtggctcctgttataactattatagcaccaggtctatgaccaggagaattagactggcattaaatcagaataagagattttgcacctgcaatagaccttatgacacctaaccaaccccattatttacaattaaacaggaacagagggaatactttatccaactcacacaagctgctttcctcccagatccatgcttttttgcgtttattattttttagagatgggggcttcactatgttgcccacactggactaaaactctgggcctcaagtgattgtcctgcctcagcctcctgaatagctgggactacaggggcatgccatcacacctagttcatttcctctatttaaaatatacatggcttaaactccaactgggaacccaaaacattcatttgctaagagtctggtgttctaccacctgaactaggctggccacaggaattataaaagctgagaaattctttaataatagtaaccaggcaacaccattgaaggctcatatgtaaaaatccatgccttcctttctcccaatctccattcccaaacttagccactggcttctggctgaggccttacgcatacctcccggggcttgcacacaccttcttctacagaagacacaccttgggcatatcctacagaagaccaggcttctctctggtccttggtagagggctactttactgtaacagggccagggtggagagttctctcctgaagctccatcccctctataggaaatgtgttgacaatattcagaagagtaagaggatcaagacttctttgtgctcaaataccactgttctcttctctaccctgccctaaccaggagcttgtcaccccaaactctgaggtgatttatgccttaatcaagcaaacttccctcttcagaaaagatggctcattttccctcaaaagttgccaggagctgccaagtattctgccaattcaccctggagcacaatcaacaaattcagccagaacacaactacagctactattagaactattattattaataaattcctctccaaatctagccccttgacttcggatttcacgatttctcccttcctcctagaaacttgataagtttcccgcgcttccctttttctaagactacatgtttgtcatcttataaagcaaaggggtgaataaatgaaccaaatcaataacttctggaatatctgcaaacaacaataatatcagctatgccatctttcactattttagccagtatcgagttgaatgaacatagaaaaatacaaaactgaattcttccctgtaaattccccgttttgacgacgcacttgtagccacgtagccacgcctacttaagacaattacaaaaggcgaagaagactgactcaggcttaagctgccagccagagagggagtcatttcattggcgtttgagtcagcaaaggtattgtcctcacatctctggctattaaagtattttctgttgttgtttttctctttggctgttttctctcacattgccttctctaaagctacagcctctcctttcttttcttgtccctccctggtttggtatgtgacctagaattacagtcagatttcagaaaatgattctctcattttgctgataaggactgattcgttttactgagggacggcagaactagtttcctatgagggcatgggtgaatacaactgaggcttctcatgggagggaatctctactatccaaaattattaggagaaaattgaaaatttccaactctgtctctctcttacctctgtgtaaggcaaataccttattcttgtggtgtttttgtaacctcttcaaactttcattgattgaatgcctgttctggcaatacattaggttgggcacataaggaataccaacataaataaaacattctaaaagaagtttacgatctaataaaggagacaggtacatagcaaactaattcaaaggagctagaagatggagaaaatgctgaatgtggactaagtcattcaacaaagttttcaggaagcacaaagaggaggggctcccctcacagatatctggattagaggctggctgagctgatggtggctggtgttctctgttgcagaagtcaagatggccaaagttccagacatgtttgaagacctgaagaactgttacaggtaaggaataagatttatctcttgtgatttaatgagggtttcaaggctcaccagaatccagctaggcataacagtggccagcatgggggcaggccggcagaggttgtagagatgtgtactagtcctgaagtcagagcaggttcagagaagacccagaaaaactaagcattcagcatgttaaactgagattacattggcagggagaccgccattttagaaaaattatttttgaggtctgctgagccctacatgaatatcagcatcaacttagacacagcctctgttgagatcacatgccctgatataagaatgggttttactggtccattctcaggaaaacttgatctcattcaggaacaggaaatggctccacagcaagctgggcatgtgaactcacatatgcaggcaaatctcactcagatgtagaagaaaggtaaatgaacacaaagataaaattacggaacatattaaactaacatgatgtttccattatctgtagtaaatactaacacaaactaggctgtcaaaattttgcctggatattttactaagtataaattatgaaatctgttttagtgaatacatgaaagtaatgtgtaacatataatctatttggttaaaataaaaaggaagtgcttcaaaacctttcttttctctaaaggagcttaacattcttccctgaacttcaattaaagctcttcaatttgttagccaagtccaatttttacagataaagcacaggtaaagctcaaagcctgtcttgatgactactaattccagattagtaagatatgaattactctacctatgtgtatgtgtagaagtccttaaatttcaaagatgacagtaatggccatgtgtatgtgtgtgacccacaactatcatggtcattaaagtacattggccagagaccacactgaaataacaacaattacattctcatcatcttattttgacagtgaaaatgaagaagacagttcctccattgatcatctgtctctgaatcaggtaagcaaatgactgtaattctcatgggactgctattcttacacagtggtttcttcatccaaagagaacagcaatgacttgaatcttaaatacttttgttttaccctcactagaggtccagagacctgtctttcattataagtgagaccagctgcctctctaaactaatagttgatgtgcattggcttctcccagaacagagcagaactatcccaaatccctgagaactggagtctcctggggcaggcttcatcaggatgttagttatgccatcctgagaaaggccccgcaggccgcttcaccaggtgtctgtctcctaacgtgatgtgttgtggttgtcttctctgacaccagcatcagaggttagagaaagtctccaaacatgaagctgagagagaggaagcaagccagttgaaagtgagaagtctacagccactcatcaatctgtgttattgtgtttggagaccacaaatagacactataagtactgcctagtatgtcttcagtactggctttaaaagctgtccccaaaggagtatttctaaaatattttgagcattgttaagcagatttttaacctcctgagagggaactaattggaaagctaccactcactacaatcattgttaacctatttagttacaacatctcatttttgagcatgcaaataaatgaaaaagtcttcctaaaaaaatcatctttttatcctggaaggaggaaggaaggtgagacaaaagggagagagggagggaagcctaatgaaacaccagttacctaagaccagaatggagatcctcctcactacctctgttgaatacagcacctactgaaagaactttcattccctgaccatgaacagcctctcagcttctgttttccttcctcacagaaatccttctatcatgtaagctatggcccactccatgaaggctgcatggatcaatctgtgtctctgagtatctctgaaacctctaaaacatccaagcttaccttcaaggagagcatggtggtagtagcaaccaacgggaaggttctgaagaagagacggttgagtttaagccaatccatcactgatgatgacctggaggccatcgccaatgactcagaggaaggtaaggggtcaagcacaataatatctttcttttacagttttaagcaagtagggacagtagaatttaggggaaaattaaacgtggagtcagaataacaagaagacaaccaagcattagtctggtaactatacagaggaaaattaatttttatccttctccaggagggagaaatgagcagtggcctgaatcgagaatacttgctcacagccattatttcttagccatattgtaaaggtcgtgtgacttttagcctttcaggagaaagcagtaataagaccacttacgagctatgttcctctcatactaactatgcctccttggtcatgttacataatcttttcgtgattcagtttcctctactgtaaaatggagataatcagaatcccccactcattggattgttgtaaagattaagagtctcaggctttacagactgagctagctgggccctcctgactgttataaagattaaatgagtcaacatcccctaacttctggactagaataatgtctggtacaaagtaagcacccaataaatgttagctattactatcattattattattattttattttatttttttgagatggagtctggctctgtcacccaggctggagtgcagtggcgcaatctcggctcactgcaagctctgcctcctgggttcatgccattctcctgcctcagcctcccgagtagctgggaatacaggcacccgccactgttcccggctaattttttgtatttttagtagagacggagtttcaccgtggtctccatctcctcgtgatccacccaccttggcctcccaaagtgccgggattacaggcgtgagccaccgcgcccggcctatgattattattattattactactactactacctatatgaatactaccagcaatactaatttattaatgactggattatgtctaaacctcacaagaatcctaccttctcattttacataaaaggaaactaagctcattgagataggtaaactgcccaatggcatacatctgtaagtgggagagcctcaaatctaattcagttctacctgagtaaaaaaatcatggtttctcctccatccctttactgtacaagcctccacatgaactataaacccaatattcctgtttttaagataatacctaagcaataacgcatgttcacctagaaggttttaaaatgtaacaaaatataagaaaataaaaatcactcatatcgtcagtgagagtttactactgccagcactatggtatgtttccttaaaatctttgctatacacatacctacatgtgaacaaatatgtctaacatcaagaccacactatttacaactttatatccagcttttcttacttagcaatgtattgaggacattttagagtgcccgtttttcaccattataagcaatgcaacaatgaacatctgtataaataaatattcatttctctcaccctttatttccttagaatatattcctagaagtagaatttcccagagccatgaggatttgtgacgctattgatatgtgccactttgcactctctgtgacatatataattatttttaatgcattcatttttttctcagagtgcattcgtttgaaaacatagacgggaaatactggtagtcttccttgtcagttagaaacacccaaacaatgaaaaatgaaaaagttgcacaaatagtctctaaaaacaatgaaactattgcctgaggaattgaagtttaaaaagaagcacataagcaacaacaaggataatcctagaaaaccagttctgctgactgggtgatttcacttctctttgcttcctcatctggattggaatattcctaatatcccctccagaactattttccctgtttgtactagactgtgtatatcatctgtgtttgtacatagacattaatctgcacttgtgatcatggttttagaaatcatcaagcctaggtcagcaccttttagcttcctgagcaatgtgaaatacaactttatgaggatcatcaaatacgaattcatcctgaatgacgccctcaatcaaagtataattcgagccaatgatcagtacctcacggctgctgcattacataatctggatgaagcaggtacattaaaatggcaccagacatttctgtcatcctcccctcctttcatttacttatttatttatttcaatctttctgcttgcaaaaaacatacctcttcagagttctgggttgcacaattcttccagaatagcttgaagcacagcacccccataaaaatcccaagccagggcagaaggttcaactaaatctggaagttccacaagagagaagtttcctatctttgagagtaaagggttgtgcacaaagctagctgatgtactacctctttggttctttcagacattcttaccctcaattttaaaactgaggaaactgtcagacatattaaatgatttactcagatttacccagaagccaatgaagaacaatcactctcctttaaaaagtctgttgatcaaactcacaagtaacaccaaaccaggaagatctttattatctctgataacatatttgtgaggcaaaacctccaataagctacaaatatggcttaaaggatgaagtttagtgtccaaaaacttttatcacacacatccaattttcatggcggaccatgttttagtttcaacagtatacatattttcaaaggtccagagaggcaattttgcaataaacaagcaagactttttctgattggatgcacttcagctaacatgctttcaactctacatttacaaattattttgtgttctatttttctacttaatattatttctgcaattttcccaatattgacatcgtgtatgtatttgccatttttaatatcactagacaattcaatcaggttgctacgttggtcccttgggtttactctaaatagcttgattgcaaatatctttgtatatattattgttttttctcctatcttgtaatttctttgagcacatcccaaagaggaatgcctagatcaatgggcacaaataatttgacagctcttattaaacattattctgtaagtaaaaactgaactacttttcagtatcactagcaacatatgagtgtatcagcttcctaaacccctccatgttaggtcattatgaacttatgatctaacaaattacagggtcttatcccactaatgaaattataagagattcaacacttattcagccccgaaggattcattcaacgtagaaaattctaagaacattaaccaagtatttacctgcctagtgagtgtggaagacattgtgaaggacacaaagatgtatagaattccattcctgacttccaggtatttacaccataggtggggacctaactacacacacacacacacacacacacacacacacacacacaccatgcacacacaatctacatcaacacttgattttatacaaatacaatgaatttactttctttttggttcttctcttcaccagtgaaatttgacatgggtgcttataagtcatcaaaggatgatgctaaaattaccgtgattctaagaatctcaaaaactcaattgtatgtgactgcccaagatgaagaccaaccagtgctgctgaaggtcagttgtcctttgtctccaacttaccttcatttacatctcatatgtttgtaaataagcccaataggcagacacctctaacaaggtgacactgtcctctttccttcctaccacagcccccacctgcccaccccactcccattgattccagaggcgtgcctaggcaggatctatgagaaaatataacagagagtaagaggaaaattaccttctttctttttcctttccctgcctgaccttattcacctcccatcccagagcatccatttattccattgatctttactgacatctattatctgacctacacaatactagacattaggacaatgtggcctgcctccaagaaactcaaataagccaactgagatcagagaggattaatcacctgccaatgggcacaaagcaacaagctgggagccaagtcccaaaatggggcctgctgcttccagttcccctctctctgcattgatgtcagcattatccttcgtcccagtcctgtctccactaccactttccccctcaaacacacacacacacaacagccttagatgttttctccactgataagtaggtgactcaatttgtaagtatataatccaagaccttctattcccaagtagaatttatgtgcctgcctgtgcttttctacctggatcaagtgatgtctacagagtagggcagtagcttcattcatgaactcattcaacaagcattattcactgagagccttgtatttttcaggcatagtgccaacagcagtgtggacagtggtgcatcaaagcctctagtctcatagaacttagtcttctggaggatatggaaaacagacaacccaaacaaccaacaaaagagcaagatgctgcaaaaaaaaaaaaaaatgaatagggtgctaagatagagaaaagtgggagagtgctatttagacaaagtggtaaaaacaaagccccttgtgagatgagagctgccgacaggagggggcgggtcatggttgtgggtttttgggtaggacattcagaggagggggcgggtcgtggttgtgggtttttgggtaggacattcagaggagggggcgggtcgtggttgtgggtttttgggtaggacattcagaggagggggcgggtcgtggttgtgggtttttgggtaggacattcagaggagggggcgggtcgtggttgtgggtttttgggtaggacattcagaggagggggcgggtcgtggttgtgggtttttgggtaggacattcagaggagggggcgggtcgtggttgtgggtttttgggtaggacattcagaggagggggcgggtcgtggttgtgggtttttgggtaggacattcagaggagggggcgggtcgtggttgtgggtttttgggtaggacattcagaggagggggcgggtcgtggttgtgggtttttgggtaggacattcagaggagggggcgggtcgtggttgtgggtttttgggtaggacattcagaggagggggcgggtcgtggttgtgggtttttgggtaggacattcagaggagggggcgggtcatggttgtgggtttttgggacattcagaggagtctgaatgcacccaggcctacaacttcaagatggtaaaggacagctccaaggatcagaagaagcattcttggaactggggcattttgagaaggaggaaaaatatgcagagactagtgcttgcagagcttgcatttggatttcatttgaggtacaatgaaaacccattaatgggtttcacacagtgcaatggcctgacctcacttatatttcctaaaatagaaaacagatcagaaggaaggcaatagagaagcagaaagtccaatgaggaggtttcacagcagtcatgggggtggggtaaggaaaagaagtggaaagaaacagacagaattgggttatattttggagatagaaccaacagaaggaagaggagaaacaacatttactgagaagggaaaaagtaggagaggaataggtttgggaaataaatcctgctgacattggaaaccccaaggaagcctcaaaagtatatttacttgctttagatttaaaagaataggaaagaagcatctcaacttggaatttgaaatctatttttccataaaagtattgttaaattctactcatactcacaagaaaagtacattctaaagagtatattgaaagagtttactgatatacttaggaattttgtgtgtatgtgtgtgtgtgtatgtgtgtgtgtgtgtttaaccttcaattgttgacttaaatactgagataaatgtcatctaaatgctaaattgatttcccaaaggtatgatttgttcacttggagatcaaaatgtttagggggcttagaatcactgtagtgctcagatttgatgcaaaatgtcttaggcctatgttgaaggcaggacagaaacaatgtttccctcctacctgcctggatacagtaagatactagtgtcactgacaatcttcataactaatttagatctctctccaatcaactaaggaaatcaactcttattaatagactgggccacacatctactaggcatgtaataaatgcttgctgaatgaacaaatgaatgaagagcctatagcatcatgttacagccatagtcctaaagtgctgtttctcatgaaggccaaatgctaagggattgagcttcagtcctttttctaacatcttgttctctaacagaattctcttcttttcttcataggagatgcctgagatacccaaaaccatcacaggtagtgagaccaacctcctcttcttctgggaaactcacggcactaagaactatttcacatcagttgcccatccaaacttgtttattgccacaaagcaagactactgggtgtgcttggcaggggggccaccctctatcactgactttcagatactggaaaaccaggcgtaggtctggagtctcacttgtctcacttgtgcagtgttgacagttcatatgtaccatgtacatgaagaagctaaatcctttactgttagtcatttgctgagcatgtactgagccttgtaattctaaatgaatgtttacactctttgtaagagtggaaccaacactaacatataatgttgttatttaaagaacaccctatattttgcatagtaccaatcattttaattattattcttcataacaattttaggaggaccagagctactgactatggctaccaaaaagactctacccatattacagatgggcaaattaaggcataagaaaactaagaaatatgcacaatagcagttgaaacaagaagccacagacctaggatttcatgatttcatttcaactgtttgccttctacttttaagttgctgatgaactcttaatcaaatagcataagtttctgggacctcagttttatcattttcaaaatggagggaataatacctaagccttcctgccgcaacagttttttatgctaatcagggaggtcattttggtaaaatacttcttgaagccgagcctcaagatgaaggcaaagcacgaaatgttattttttaattattatttatatatgtatttataaatatatttaagataattataatatactatatttatgggaaccccttcatcctctgagtgtgaccaggcatcctccacaatagcagacagtgttttctgggataagtaagtttgatttcattaatacagggcattttggtccaagttgtgcttatcccatagccaggaaactctgcattctagtacttgggagacctgtaatcatataataaatgtacattaattaccttgagccagtaattggtccgatctttgactcttttgccattaaacttacctgggcattcttgtttcattcaattccacctgcaatcaagtcctacaagctaaaattagatgaactcaactttgacaaccatgagaccactgttatcaaaactttcttttctggaatgtaatcaatgtttcttctaggttctaaaaattgtgatcagaccataatgttacattattatcaacaatagtgattgatagagtgttatcagtcataactaaataaagcttgcaacaaaattctctgacacatagttattcattgccttaatcattattttactgcatggtaattagggacaaatggtaaatgtttacataaataattgtatttagtgttactttataaaatcaaaccaagattttatatttttttctcctctttgttagctgccagtatgcataaatggcattaagaatgataatatttccgggttcacttaaagctcacattacacatacacaaaacatgtgttcccatctttatacaaactcacacatacagagctacattaaaaacaactaataggccaggcacggtggctcagacctgtaatcccagcactttgggaggccaaggtgggaagatcacttgaggtcaggagttcaagaccagcctaggcaacatagtgagatctcatctctacaaaaaaaaatgaaaaattaaaaaatgagctggacatggtagtacacacctgtagtcccagctactcgggaggcttgaggtgggaggatcacttgagcctgggagatggaggctgcagtgagccataatcacaccattgcaccccaacctgggcaacagagtgagacccagtctcaaaagataaatttttaaaaatgttaaaaaatatataaaagagaattttaaaagaacaactaatagatcaaagcatggatgcaagatatatttagttggaaaatcaaggttaaaatcaagggatcttggaattaggtgtggtagatttgggtaaggagtagtctaagatgaccctgtttcttggtactggagactggatgagtggcagcgtcttaaccatatttttggtagaaatatggaggtcttctccattccaggatgaatgatgagtaaaattttaggcatgtaatttgagctactagaaggacactcaattgcagatgtacaatggggagatgataacctatctggaactcagaaaaataactgtatatagatatgaaagacatcagtaggtatgtagtagataaaatcctaaaagtgatgtcaaagggagaagagaagtatatggtgaacactgttgtttgtccatgcaattgccatctcttcttcttccttactgacagaaccctgatttcactgagaagtcaacatgcccttccccaattgatgaatccaattggtttaagattatgttcattctattcttacatgactaagtcacgttgacttaatcctatcaaatgagatgtcgatctggaaacaacttctggaaaagattttctaccttgataaaataaagagccatatagatggtcctttatcttccttcttccttgaatgagatatgttctatgaggaagtgaagcttagaactgtggtcagcaacttgcaacgactgggaagtcagagccacacaatgaagaatgcagagtggaaggagaaaaagagccagcatctctgacaacattgttacaccgagaacctacctccagattttaagaaaacaagaaatgctactgttattaagccatttcactgggtttgctatgacttgcagtcaaatctagcttaactgatacagagcaccacagagaactggtctctcatttgtctcatcctgttctttctagcagccacgactttcctagggtttccttagcccaagtctggctagagcaagactaagtaagacttgattccttaatgtccttttgttttaagaaatattaaagaattatttttatattaatatattttaagaaataaggaaatacaaaacactgagcaagcaacacaaattcaagaaatcttaaaaagtataatagctgctcagtctctgattaacagtgaaatatggaatcattgtagaaatggccttgg

SEQ ID NO: 313 - DNA, 2342 bp, Homo sapiens
agaggggggcggtgtactgcgcatgcgggaagatggcgggccgggcgacttgagatccgcgggtctccctcctctttttccgtctgcgtcgggagctcccgggcacgtgaggccgtgccgcgtttactggcgggcgggacggcctagccgggcggcgcctcggaggaagccgcggaccccttaggtgctgggcccttggaaatcggcgcgtggggggcggtgctcgagctgagcgcgagagggcgggagagctcgtggggtgcgaggggagcaggacgcccggccgggcagcatgagtcagcagcggccggcgaggaagttacccagtctcctcctggacccgacggaggagacggttcgccgtcggtgccgagaccccatcaacgtggagggcctgctgccatcaaaaataaggattaatttagaagataatgtacaatatgtgtccatgagaaaagctctaaaagtgaagagacctcgttttgatgtatcgctggtttatttaactcgaaaatttatggatcttgtcagatctgctcccgggggtattcttgacttaaacaaggttgcaacgaaactgggagtccgaaagcggagagtgtatgacatcaccaatgtcttagatggaatcgacctcgttgaaaagaaatccaagaaccatattagatggataggatctgatcttagcaattttggagcagttccccaacaaaagaagctacaggaggaactttctgacttatcagcaatggaagatgctttggatgagttaattaaggattgtgctcagcagctgtttgagttaacagatgacaaagaaaatgaaagactagcatatgtgacctatcaagacattcatagcattcaggccttccatgaacagatcgtcattgcagttaaagctccagcagaaaccagattggatgttccagctcccagagaagactctatcacagtgcacataaggagcaccaacggacctatcgatgtctatttgtgtgaagtggagcagggtcagaccagtaacaaaaggtctgaaggtgtcgggacctcttcatctgagagcactcatccagaaggccctgaggaagaagaaaatcctcagcaaagtgaagaattgcttgaagtaagcaactgatggcatttgagaatttatgtatcactgagttttttgggaatatcttcgtggagaattacgcatcaaatttgattctcagagcaataaattatccatgaagtgctctcgttctcagtagcggcatcatggccagtagtgtctttgaggagttcaccacttagattactgagtaattgtggtttccacatttgaaaacaactccttttataattattcactgctttttgtcagtgaaatagacatcttgcctcctgaagtagcttcatcacagagtgtcatgaagacagacagtcaggctgaaatggacagttctttgtggactctacccttcccttcaaggagtatgtcatatatcacaaaagaaattgccttacactggttcatgtttgcagttactgttgtacattgcatagatgtacacacgaatttaaatgtgatgtctttgtatatatctgtataatgttgagattacttacgaaatatgtctgagtgacacttttcacccttgtacagccaaaataatgtatatatggaaagtgacagacaaattctctaatctctttggtacctataacttattagaatcctctggatgagggttagaagagactttttccaaacttctacatgtagaagtatcataaatgtgctacacatttatgtttgtggatttaattaaagtattttaatatggttttcagtgctaaaattggagtcagatacttcttggttttaagctgtctacctaattgctgtctcccagcagactggtggcatgcccagtggctttgggggcaaggatagaaatgccatcaggaaatagctgaattcattgtgaaacatgaattcagtcatggtgataattggaaactcctttcaggtttttgcaagtagattttgtaatgtttgtgtatgcagccttgctgttgagtcagtccaaggggttttacttaggacaagttgtaccttgccctctctccagctctgctcccacattttcacatacctagctgtttctacctcattgggtaagtcatttaccactctgtgcctcagtttactctgtagtttaccattagactgtgagctccttgagggactttgtcataatcactgttacatcccagtgcctcacaccatgcctggcccttaagaagtgctcaataaatgtctgaacaaataagtgaaaaaaaaaaaaaaaaaa

SEQ ID NO: 314 - DNA, 9530 bp, Homo sapiens
cggggccagggcagcgcggactcgcgtcccgtggagcgttccaggcgggcgcgcggctttctccccagacccaccgagtggcggcggaggcgagatgcgcgggggcgtgctcctggtcttgctgctgtgtgtcgccgcgcagtgccggcagagaggcctgtttcctgccattctcaatcttgccagcaatgctcacatcagcaccaatgccacctgtggcgagaaggggccggagatgttctgcaaacttgtggagcatgtgccaggtcggcccgtccgaaacccacagtgccggatctgtgatggcaacagcgcaaaccccagagaacgccatccaatatcacatgccatagatggcaccaataactggtggcaaagtcccagcattcagaatgggagagaatatcactgggtcacaatcactctggacttaagacaggtctttcaagttgcatatgtcatcattaaagctgccaatgcccctcgacctggaaactggattttggagcgttctctggatggcaccacgttcagcccctggcagtattatgcagtcagcgactcagagtgtttgtctcgttacaatataactccaagacgagggccacccacctacagggctgatgatgaagtgatctgcacctcctattattccagattggtgccacttgagcatggagagattcatacatcactcatcaatggcagaccaagcgctgacgatctttcacccaagttgttggaattcacttctgcacgatatattcgccttcgcttgcaacgcattagaacgctcaatgcagatctcatgacccttagccaccgggaacctaaagaactggatcctattgttaccagacgctattattattcaataaaggacatttctgttggaggcatgtgtatctgctatggccatgctagtagctgcccatgggatgaaactacaaagaaactgcagtgtcaatgtgagcataatacttgcggggagagctgtaacaggtgctgtcctgggtaccatcagcagccctggaggccgggaaccgtgtcctccggcaatacatgtgaagcatgtaattgtcacaataaagccaaagactgttactatgatgaaagtgttgcaaagcagaagaaaagtttgaatactgctggacagttcagaggaggaggggtttgcataaattgcttgcagaacaccatgggaatcaactgtgaaacctgtattgatggatattatagaccacacaaagtgtctccttatgaggatgagccttgccgcccctgtaattgtgaccctgtggggtccctcagttctgtctgtattaaggatgacctccattctgacttacacaatgggaagcagccaggtcagtgcccatgtaaggaaggttatacaggagaaaaatgtgatcgctgccaacttggctataaggattacccgacctgtgtctcctgtgggtgcaacccagtgggcagtgccagtgatgagccctgcacagggccctgtgtttgtaaggaaaacgttgaggggaaggcctgtgatcgctgcaagccaggattctataacttgaaggaaaaaaacccccggggctgctccgagtgcttctgctttggcgtttctgatgtctgcagcagcctctcttggcctgttggtcaggtaaacagtatgtccgggtggctggtcaccgacttgatcagtcccaggaagatcccgtctcagcaagatgcactaggcgggcgccatcaggtcagcatcaacaacaccgcggtcatgcagagactggctcccaagtactactgggcagcccccgaggcctaccttggaaataagctgactgcgtttggcggattcctgaaatacacggtgtcctacgatattccggtagagacggtagacagtaacctcatgtcgcatgctgacgtcatcattaagggaaacggactcactttaagcacacaggctgagggtctgtcattgcagccttatgaagagtacctaaacgtggttagacttgtgcctgaaaacttccaagattttcacagcaaaaggcagattgatcgtgaccagctgatgactgtccttgccaatgtgacacatcttttgatcagagccaactacaattctgcaaaaatggctctttacaggttggagtccgtctctctggacatagccagctctaatgccatcgacctggtggtggccgctgatgtggagcactgtgaatgtccgcaaggctacacagggacctcctgtgagtcgtgcctctctggctattaccgcgtggatggaatactctttggaggaatttgtcaaccctgtgaatgccacggccatgcagctgagtgtaatgttcacggcgtttgcattgcgtgtgcgcacaacaccaccggcgtccactgtgagcagtgcttgcccggcttctacggggagccttcccgagggacacctggggactgccagccctgcgcctgccctctcaccatagcctccaacaatttcagccccacctgccacctcaatgatggagatgaagtggtctgtgactggtgtgccccgggctactcaggagcttggtgtgagagatgtgcagatggttactatggaaacccaacagtgcctggcgaatcttgtgttccctgtgactgcagcggcaacgtggacccctcggaggctggtcactgtgactcagtcaccggggagtgcctgaagtgcctggggaacacagatggcgcccactgtgaaaggtgtgctgacgggttctatggggacgctgtgacagccaagaactgccgcgcctgtgaatgccatgtgaaaggctcccattctgccgtgtgccatcttgagaccgggctctgtgactgcaaaccaaacgtgactggacagcagtgtgaccagtgcttgcatggctattatgggctggactcaggccatggctgccggccctgcaactgcagcgtggcaggctccgtgtcagatggctgcacggatgaaggccagtgtcactgtgtcccaggtgtggcagggaaaaggtgtgacaggtgtgcccatggcttctacgcctaccaggatggtagctgtacaccctgtgactgcccacacactcagaatacctgcgacccagaaactggagagtgtgtctgcccccctcacacacagggtgtgaagtgtgaagaatgtgaggatgggcactggggctacgatgcggaggtggggtgccaggcctgcaattgcagtctcgtggggtcgactcatcatcggtgcgatgtggtcaccggccattgccagtgcaagtcaaaatttggtggccgggcctgcgatcagtgttccttgggttacagagactttcccgactgtgttccctgtgactgtgacctgagggggacgtcgggggacgcctgcaacctggagcagggtctctgcggctgtgtggaggaaaccggggcctgcccttgcaaggaaaatgtctttggtcctcagtgcaacgaatgtcgagagggcaccttcgctctccgcgcagacaaccccctgggctgcagcccgtgcttctgctccgggctgtcccacctctgctcagagctggaggactacgtgaggaccccagtaacgctgggctccgatcagcctcttctgcgtgtggtttctcagagtaacttgaggggcacgaccgagggggtttactaccaggcccccgacttcctgctggatgccgccaccgtccggcagcacatccgtgcagagccgttttactggcggctgccgcagcagttccaaggagaccagctcatggcctatggtggcaaactgaagtacagcgtggccttctattctttggatggcgtcggcacctccaattttgagcctcaagttctcatcaaaggtggtcggatcagaaagcaagtcatttacatggatgcaccagccccagagaatggagtgagacaggaacaagaagtagcaatgagagagaatttttggaaatattttaactctgtttctgaaaaacctgtcacgcgagaggattttatgtctgtcctcagcgatattgagtacatcctcatcaaggcatcgtatggtcaaggattacagcagagcagaatctcagacatttcaatggaggttggcagaaaggctgaaaagctgcacccagaagaagaggttgcatctcttttagagaattgtgtctgtcctcctggcactgtgggattctcatgtcaggactgcgcccctgggtaccacagagggaagctcccagcagggagtgacaggggaccacgccctctggttgctccttgtgttccctgcagttgcaacaaccacagtgacacctgtgaccccaacaccgggaagtgtctgaactgtggcgataacacagcaggtgaccattgtgatgtgtgtacttctggctactacgggaaggtgactggctcagcaagtgactgtgctctgtgtgcctgtcctcacagccctcctgccagttttagtcccacttgtgtcttggaaggggaccacgatttccgttgtgacgcctgtctcctgggctatgaaggaaaacactgtgaaaggtgctcctcaagctattatgggaaccctcaaacaccaggtggcagttgccagaagtgtgactgcaacccgcacggctctgtccacggtgactgtgaccgcacatctgggcagtgcgtttgcaggctgggggcctcggggctccggtgcgatgagtgtgaaccgaggcacattctgatggaaacagattgtgtttcctgtgatgatgagtgtgtaggtgtgctgctgaatgacttggatgagattggtgatgccgttctttctctgaacctcactggcattatccctgtcccatatggaattttgtcaaacctggaaaatacaactaaatatctccaggaatctttattaaaagaaaatatgcaaaaggacctgggaaaaattaagcttgaaggtgttgcagaagaaacggacaacctgcaaaagaagctcactaggatgttagcgagtacccaaaaggtgaatagggcaactgagagaatcttcaaggagagtcaagacctggccatagccattgagaggctgcagatgagcatcacagaaattatggaaaagacaactttaaatcagactttggatgaagatttcctactacccaattctactcttcagaacatgcaacagaatggtacatctttgctagaaatcatgcagataagagacttcacacagttgcaccaaaatgccacccttgaactcaaggctgctgaagatttattgtcacaaattcaggaaaattaccagaagccgctggaagaattggaggtattgaaagaagcagcaagccacgtcctttcaaagcacaacaatgaactaaaggcggctgaggcgctcgtgagggaagctgaggcaaagatgcaggaaagcaaccacctgctgctcatggtcaatgctaatctgagagaattcagtgataaaaagctgcatgttcaagaagaacaaaatctgacctcagagctcattgtccaaggaagaggattgatagatgctgctgctgcacaaacagatgctgtacaagatgctctagagcacttagaggatcaccaggataagctacttttatggtctgccaaaatcaggcaccacatagatgacctggtcatgcacatgtcccaaaggaacgcagtcgacctggtctacagagctgaggaccatgccgctgagttccagagactagcagatgttctgtacagtggccttgaaaacatcagaaatgtgtccctgaatgccaccagtgcagcctatgtccattacaacatccagagcctgattgaagaatcggaggaactggccagagatgctcacaggactgtgactgagacgagcctgctctcagaatcccttgtttctaacgggaaagcggccgtgcagcgcagctccagatttctaaaagaaggcaacaacctcagcaggaagcttccaggtattgcattggaactgagtgaattgagaaataagacaaacagatttcaagagaatgctgttgaaattaccaggcaaaccaatgaatcactcttgatacttagagcaattcctaaaggtataagagacaagggagccaaaaccaaagagctggccacgtctgcaagccagagcgcggtgagcacgctgagggacgtggcggggctgagccaggagctgctgaacacatctgccagcctgtccagggtcaacaccacattacgagagacacaccagcttctgcaggactccaccatggccactctgttggctggaagaaaagtcaaagacgtggaaattcaagccaaccttttgtttgatcggttgaagcctttgaagatgttagaggagaatctgagcagaaacctatcagaaattaaactgttgatcagccaggcccgcaaacaagcagcttctattaaagtcgccgtgtctgcagacagagattgcatccgggcctaccagcctcagatttcctctaccaactacaataccttaacactaaatgttaagacacaggaacccgataatcttctcttctacctcggtagcagcaccgcttctgatttccttgcagtggagatgcggcgagggagagtggccttcctgtgggacctgggctccgggtccacacgcttggagtttccagactttcccattgatgacaacagatggcacagtatccatgtagccagatttggaaacattggttcactgagtgtaaaggaaatgagctcaaatcaaaagtcaccaacaaaaacaagtaaatcccctgggacagctaatgttctggatgtaaacaattcaacactcatgtttgttggaggtcttggaggacaaatcaagaaatctcctgctgtgaaggttactcattttaaaggctgcttgggggaggccttcctgaatggaaaatccataggcctatggaactatattgaaagggaaggcaagtgccgtgggtgcttcggaagctcccagaatgaagacccttccttccattttgacgggagtgggtactctgtcgtggagaagtcacttccggctaccgtgacccagataatcatgctttttaataccttttcacctaatggacttcttctctacctgggttcatacggcacaaaagactttttatccatcgagctgtttcgtggcagagtgaaggttatgactgacctgggttcaggacccattacccttttgacagacagacgttataacaatggaacctggtacaaaattgccttccagcgaaaccggaagcaaggagtgctagcagttatcgatgcctataacaccagtaataaagaaaccaagcagggcgagactccgggagcatcttctgacctcaaccgcctagacaaggacccgatttatgtgggtggattaccaaggtcaagagttgtaaggagaggtgtcaccaccaaaagctttgtgggctgcatcaagaacctggaaatatccagatcaacctttgacttactcagaaattcctatggagtgagaaaaggctgtttactggagcccatccggagtgttagcttcctgaaaggcggctacattgaattgccacccaaatctttgtcaccagaatcagaatggctggtaacatttgccaccacgaacagcagtggcatcatcctggctgccctcggcggggatgtggagaagcggggtgatcgtgaggaagcacacgtgcccttcttttccgtcatgctgatcggaggcaacattgaggtacatgtcaatcctggggatgggacaggcctgagaaaagctctcctgcacgctcccacgggtacctgcagtgatggacaagcgcattccatctccttggtcaggaatcggagaattatcactgtccaattggatgagaacaatcctgtggaaatgaagttgggcacattagtagaaagcaggacgataaatgtgtccaatctgtacgtcgggggaattccagagggagaggggacgtcactgctcacaatgagaagatcgttccatggctgtatcaaaaacctgatcttcaatttggaacttttggatttcaacagtgcagttggccatgagcaagtcgacctggacacctgctggctgtcagaaaggcctaagctggctcccgatgcagaggacagcaagctcttgccagagccccgggcttttccagaacagtgtgtggtggatgcagctctggagtacgttcccggcgctcaccagtttggtctcacacaaaacagccatttcatcttgccttttaatcagtcggctgtcagaaagaagctctcggttgagctaagcatccgcacgttcgcctccagcggcctgatttactacatggctcatcagaaccaagcagactacgctgtgctccagctgcacgggggccgcctccacttcatgtttgaccttggcaaaggcagaacaaaggtctctcaccctgcactgctcagtgatggcaagtggcacacggtcaagacagactatgttaaaagaaaaggcttcataactgtcgacggccgagagtctcccatggtgactgtggtgggagatggaaccatgctggatgtggagggtttgttctacctaggaggcctgccctcccagtaccaggccaggaaaattggaaatatcacccacagcatccctgcctgcattggggatgtgacggttaacagcaaacagctggacaaggacagcccggtgtctgccttcacggtgaacaggtgctacgcagtggcccaggaaggaacatactttgacggaagcggatatgcagctcttgtcaaagagggctacaaagtccagtcagatgtgaacatcacactggagtttcgaacctcctcgcagaatggcgtcctcctggggatcagcactgccaaagtggatgccattggactagagcttgtggacggcaaggtcttgttccatgtcaacaatggtgctggcaggataacagctgcatatgagcccaaaaccgccactgtgctctgtgatggaaaatggcacactcttcaagctaacaaaagcaaacaccgtatcactctgattgttgacgggaacgcagttggcgctgaaagtccacacacccagtctacctcagtggacaccaacaatcccatttatgttggtggctatcctgctggtgtgaagcaaaaatgcctgcgcagccagacctcgttccgcgggtgtttgaggaagctagctctgattaagagcccgcaggtgcagtcctttgacttcagcagagcgttcgaactgcacggagttttccttcattcctgtcctgggaccgagtcctgaacttcaagcagaatcctcagttggaatcattgctaatattttgaggagaagtgtatgtgtgaattaagaatctcttcagttcatatttcatttccaactcaggttaagtgtttctggggagagatgttgtgtttacgttacactaaaaccacatgtgcaacaaatacctccattaaatggtctaaaatgtaaaaaaaaaaaaaaaaaa

SEQ ID NO: 315 - DNA, 2514 bp, Homo sapiens
cctcgtgccgcagttctgccaccgtcactgagaagctcagcggtagcttttgggaagcaggacgttctcaccaggagagcgtcctctcgagatttctgctccctccattcagggcgtttgggagccaccccttcattttttaaaaaaagtatttctctgtgaccgacggccggggccttctgacggtctgaggtcttgcttgggccagtcacctcctgtcacggtccgcggaggggggaaggataagagggcgaggagctcatcgctcgccacccccgtgggcttcttgggcgcaggtcggagctgggtgggccggctccccggcccctggcttgggcgaccatgtccgcatccgcccagcagctggcggaggagctgcagatcttcggcctagactgcgaggaggctctaattgagaaattggtagagctttgtgttcagtatggacagaatgaggagggaatggtaggcgagcttatagccttctgcaccagcacacataaagttggccttacctcagagatcctgaactcttttgagcatgagtttctgagcaaaagattatcgaaagccaggcatagtacctgcaaggacagtggccatgcaggagctagagacattgtttccattcaagagctaattgaagtggaagaagaagaggaaatcctcttgaactcttacaccacaccttcaaagggttctcagaagcgagctatctctaccccagaaacccccctaacaaaaaggagtgtgtcaactcgtagcccccatcagctactctcaccgtcaagtttctctccaagtgctactccctcccagaaatacaactcacgaagtaaccgaggagaagtggttacctccttcggcttagcacagggagtatcttggtctgggagaggaggagctggaaacatcagcctgaaggtcttgggatgtccagaggcactaactgggagctacaaatccatgtttcagaagctcccagacattcgagaagttctgacctgtaagatagaagaacttggcagcgaactcaaggaacattacaagattgaagctttcactcctttgctagccccagcacaggagcctgtcactctgctgggccagattggctgtgatagcaacgggaagctgaacaacaagtcagtgattctcgagggagaccgggaacattcctcgggtgctcaaattccagtggatttatctgagcttaaggaatattctctgtttcctggacaggttgtaattatggaaggaatcaacaccactggtaggaaacttgttgccaccaaactctacgagggtgtgccacttccattttatcagcccactgaagaggatgcagactttgagcaaagcatggtcctggttgcctgtggaccatacaccacatctgacagcatcacgtatgaccccctgcttgacctgattgctgtcatcaaccatgaccggccagatgtctgcatcctgtttggccctttcctggatgctaagcatgaacaggtggagaattgtctactgacaagtccatttgaagacattttcaagcagtgtctacgaacaattattgaaggcacaagaagctccggctcccaccttgtctttgtcccgtcattgagagatgtgcaccatgagcctgtgtacccccagccgcctttcagctactccgatctgtctcgagaggacaaaaagcaagtacagtttgtgtccgagccctgcagcctctccataaacggagtgatcttcggcttgacatccacagatctgcttttccacctgggggccgaggagatcagtagttcttccggaacttcagacagattcagccgaatactcaagcacatcttgacccagaggagctactacccactctacccgccccaagaagacatggccattgactatgagtcgttctatgtttacgcacagctgcctgtcaccccagatgtcctcatcatcccgtcagagctgaggtacttcgtgaaggatgtcctcggctgtgtctgtgtgaaccctgggcgccttaccaaagggcaggtgggaggcaccttcgcccgactctaccttaggaggccggcagcggacggggcagagaggcagagcccatgcattgctgtgcaggtcgtcaggatctgaggcttctgtcctctgctgttctctgctgtgtgggcccttaaagtcttagccaagagccaagacatagccctgtgacaaggtgaacagttgggtgggaaaggagagaggagccagccagggaggggcagctgcagtgaccaggcccagcagggaggacttgtgcagccgggcctgcctctgagtggtgcctctcctggaaggaagctcttgcttctcagtccatgctccgtgtccagaagtaagccagctgtggatcccgcccactcagaaaaggcgagaaggctttgtgattttctacatgaatcaaacacagaaacaacttttggagaaattaaattctgagtgtgaaaaaaaaaaaaaaaaaaaaaaaaaaaa

SEQ ID NO: 316 - DNA, 2940 bp, Homo sapiens
aggtgggcgtggccagaccagctttaggtccggggagtgtctcgccagcggcagcacacccctgtaagtggtggccagggctgccgtggcaaaatgagctgtcaactttaggttgacaggggtgtggccgcgaccgcaagggcttttgttgccgggtggacccaacagggatgggctgctggggacagctgctggtgtggttcggagccgcgggcgccattctctgctctagcccggggtcccaggagacttttctgcggtcctcgcccctgccgctggcaagtcccagcccccgggacccgaaagtcagcgccccgcctagtatcttggagccagcctccccgctgaattctccgggcaccgaggggtcttggctgttttctacctgcggggccagcggccggcatgggcccacacagacacaatgtgacggggcgtacgcggggaccagcgtggtggtgaccgtgggggccgccgggcagctgagaggcgtgcagctgtggcgcgtgccgggccctggccagtatctgatctcagcctacggagccgcgggcggcaaaggcgccaagaaccacctgtcgcgggcgcatggcgtcttcgtctcagcaatcttctccctcggtctcggggagtcgctgtacatcctggtggggcagcagggagaggacgcctgtcccggaggtagcccggagagccagctcgtctgcctcggggagtctcgagccgttgaagagcacgcggcgatggatgggagcgaaggggtcccggggtcgcggcgctgggcgggaggtggcgggggtggcgggggcgccacctacgttttccggttgcgcgctggcgagctggaaccgttgctggtggcggccggaggcggcggtcgggcctacctgaggccgcgggaccgaggccggactcaggcctcccccgagaaactggagaaccgctcggaggcgcccgggagcggcgggagaggcggggcggcagggggcgacgcttcagagactgacaacctctgggctgatggggaagatggagtatccttcatacaccccagcagcgagctcttcctgcagcctctggcagtcaccgagaaccacggagaggtagagatccgaaggcacctcaactgcagtcactgccctttgagagactgccaatggcaggcagagctccagctggctgaatgcctgtgcccagaaggcatggagctagctgtggataacgtcacctgcatggacctgcacaagcccccaggccctctggttctgatggtggctgtggtggcaacctcaacactgagcctccttatggtgtgtggggtcctgattctggtgaagcagaagaagtggcagggcctgcaggagatgaggctgccgagccctgagcttgagctgagcaagcttcgaacctctgccatcaggacagcccccaatccctattattgccaggtggggcttggcccggcccagtcctggcctctgccaccaggtgtcaccgaggtttccccagccaatgttactctgctcagagccctgggccatggtgcctttggggaggtgtatgagggactggtaattggccttcctggggactccagtcccctgcaggtagctatcaagaccctgccagaactctgctcgcctcaggatgagctggatttcctcatggaggccctcatcatcagcaagtttcgccatcagaacattgtgcggtgtgtggggctcagcctcagggccacccctcgcctcattctgctggaactgatgtctggaggggacatgaagagtttcctgaggcacagtcggccacacctgggccagccatcacctctggtcatgcgggacctgctgcaactggcccaggacatagcccagggctgccactacctggaggaaaatcacttcatccacagggatattgccgcccggaactgcctgctgagctgcgctggacccagccgagtggccaagattggggactttgggatggcacgagatatctaccgggccagttattaccgcaggggggaccgggccttgctcccagtcaagtggatgcccccagaggccttcctggagggcatcttcacatccaagacagattcctggtcttttggggtgctgctctgggagatcttctcactgggctacatgccctatcctgggcgcaccaaccaggaggtgctggacttcgtcgttggaggaggccggatggaccctcctaggggctgcccagggcctgtgtaccgcatcatgacccagtgttggcagcacgagcctgagctccgccctagctttgccagcatcttggagcgtctgcagtactgcactcaggacccggatgtgctgaattcactcctgccaatggagctggggcccaccccagaggaggaagggacttctgggctggggaacagatctttggagtgcctaagacccccacagccccaggaactgagtccagagaagttgaaaagctggggaggtagccctcttggcccctggctgtcctctggcctcaagcccctcaaatccaggggcctccaacctcagaacctttggaatcccacttatcgctcctgagccccaaggggccctgagggtaaggactgaggcactgagggtccctccctatactcctcaggctcctgggtggcctgttatgccagcggcctctgttccctgcagtctgtgctgtgtgtctgggcctgtctcggggctggcctggcagcgctgcacttgccatgctggaaaccagcccaggcctcccagggaagggcccagccacttccagcttttgatcttggggccagaggccgccttacacacaccccaggtgtccatggggagcactggattgctttcccattatgagcgtccttcatctgggcagaccccccaccctgcagatgcttctaataaaaggctcttctcatcctcc

SEQ ID NO: 317 - DNA, 1991 bp, Homo sapiens
gccgagcggagaggccgcccattggccggccagcgccacgtggccgcccccgccggtatattaggccactatttacctccggctcactcgccatgggttggagagggcagctcgggtagagagggctggcggagcggcgcagacggcggcagtcctgctcagcctctgcccggctccgtactccggccccggcctgcgccctcagaaaggtggggcccgaaccatgagctcctacctggagtacgtgtcatgcagcagcagcggcggggtcggcggcgacgtgctcagcttggcacccaagttctgccgctccgacgcccggcccgtggctctgcagcccgccttccctctgggcaacggcgacggcgccttcgtcagctgtctgcccctggccgccgcccgaccctcgccttcgcccccggccgcccccgcgcggccgtccgtaccgcctccggccgcgccccagtacgcgcagtgcaccctggagggggcctacgaacctggtgccgcacctgccgcggcagctgggggcgcggactacggcttcctggggtccgggccggcgtacgacttcccgggcgtgctggggcgggcggccgacgacggcgggtctcacgtccactacgccacctcggccgtcttctcgggcggcggctctttcctcctcagcggccaggtggattacgcggccttcggcgaacccggcccttttccggcttgtctcaaagcgtcagccgacggccaccctggtgctttccagaccgcatccccggccccaggcacctaccccaagtccgtctctcccgcctccggcctccctgccgccttcagcacgttcgagtggatgaaagtgaagaggaatgcctctaagaaaggtaaactcgccgagtatggggccgctagcccctccagcgcgatccgcacgaatttcagcaccaagcaactgacagaactggaaaaagagtttcatttcaataagtacttaactcgagcccggcgcatcgagatagccaactgcttgcacctgaatgacacgcaagtcaaaatctggttccagaaccgcaggatgaaacagaagaaaagggaacgagaagggcttctggccacggccattcctgtggctcccctccaacttcccctctctggaacaacccccactaagtttatcaagaaccccggcagcccttctcagtcccaagagccttcgtgaggccggtacttggggccgaaaaactgtggcctgcagaagtcccaggcgacccccatccctatctagacttaggagctcagtttgggatggaggtgggagaacaaaaatgaatagggatttcacttgggaaatgaagtactttagttggcttccgagttccagactatatgtccagatattaattgactgtcttgtaagccacttgtttggttatgatttgtgtcttatcagggaaaaggtgcccagctgccagcccagctccgctgctatctttgcctcacttagtcatgtgcaattcgcgttgcagagtggcagaccattagttgctgagttctgtcagcactctgatgtgctcagaagagcacctgcccaaagtttttctggttttaatttaaaggacaaggctacatatattcagctttttgagatgaccaaagctagttagggtctccttgatgtagctaagctgcttcagtgatcttcacatttgcactccagtttttttttctttaaaaaagcggtttctacctctctatgtgcctgagtgatgatacaatcgctgtttagttactagatgaacaaatccacagaatgggtaaagagtagaatctgaactatatcttgacaaatattattcaaacttgaatgtaaatatatacagtatgtatattttttaaaaagatttgcttgcaatgaccttataagtgacatttaatgtcatagcatgtaaagggttttttttgtaataaaaattatagaatctgcaaaaaaaaaaaaaaaa

SEQ ID NO: 318 - DNA, 7923 bp, Homo sapiens
gcgcactcgggcacgcgctcggaagtcgggggtcggcgcggagtgcaggctgctcccggggtaggtgagggaagcgcggaggcggggcgcgggggcagtggtcggcgagcagcgcggtcctcgctaggggcgcccacccgtcagtctctccggcgcgagccgccgccaccgcccgcgccggagtcaggcccctgggcccccaggctcaagcagcgaagcggcctccgggggacgccgctaggcgagaggaacgcgccggtgcccttgccttcgccgtgacccagcgtgcgggcggcgggatgagagggagccatcgggccgcgccggccctgcggccccgggggcggctctggcccgtgctggccgtgctggcggcggccgccgcggcgggctgtgcccaggcagccatggacgagtgcacggacgagggcgggcggccgcagcgctgcatgcccgagttcgtcaacgccgctttcaacgtgactgtggtggccaccaacacgtgtgggactccgcccgaggaatactgtgtgcagaccggggtgaccggggtcaccaagtcctgtcacctgtgcgacgccgggcagccccacctgcagcacggggcagccttcctgaccgactacaacaaccaggccgacaccacctggtggcaaagccagaccatgctggccggggtgcagtaccccagctccatcaacctcacgctgcacctgggaaaagcttttgacatcacctatgtgcgtctcaagttccacaccagccgcccggagagctttgccatttacaagcgcacacgggaagacgggccctggattccttaccagtactacagtggttcctgcgagaacacctactccaaggcaaaccgcggcttcatcaggacaggaggggacgagcagcaggccttgtgtactgatgaattcagtgacatttctcccctcactgggggcaacgtggccttttctaccctggaaggaaggcccagcgcctataactttgacaatagccctgtgctgcaggaatgggtaactgccactgacatcagagtaactcttaatcgcctgaacacttttggagatgaagtgtttaacgatcccaaagttctcaagtcctattattatgccatctctgattttgctgtaggtggcagatgtaaatgtaatggacacgcaagcgagtgtatgaagaacgaatttgataagctggtgtgtaattgcaaacataacacatatggagtagactgtgaaaagtgtcttcctttcttcaatgaccggccgtggaggagggcaactgcggaaagtgccagtgaatgcctgccctgtgattgcaatggtcgatcccaggaatgctacttcgaccctgaactctatcgttccactggccatgggggccactgtaccaactgccaggataacacagatggcgcccactgtgagaggtgccgagagaacttcttccgccttggcaacaatgaagcctgctcttcatgccactgtagtcctgtgggctctctaagcacacagtgtgatagttacggcagatgcagctgtaagccaggagtgatgggggacaaatgtgaccgttgccagcctggattccattctctcactgaagcaggatgcaggccatgctcttgtgatccctctggcagcatagatgaatgtaatgttgaaacaggaagatgtgtttgcaaagacaatgtcgaaggcttcaattgtgaaagatgcaaacctggattttttaatctggaatcatctaatcctcggggttgcacaccctgcttctgctttgggcattcttctgtctgtacaaacgctgttggctacagtgtttattctatctcctctacctttcagattgatgaggatgggtggcgtgcggaacagagagatggctctgaagcatctctcgagtggtcctctgagaggcaagatatcgccgtgatctcagacagctactttcctcggtacttcattgctcctgcaaagttcttgggcaagcaggtgttgagttatggtcagaacctctccttctcctttcgagtggacaggcgagatactcgcctctctgccgaagaccttgtgcttgagggagctggcttaagagtatctgtacccttgatcgctcagggcaattcctatccaagtgagaccactgtgaagtatgtcttcaggctccatgaagcaacagattacccttggaggcctgctcttaccccttttgaatttcagaagctcctaaacaacttgacctctatcaagatacgtgggacatacagtgagagaagtgctggatatttggatgatgtcaccctggcaagtgctcgtcctgggcctggagtccctgcaacttgggtggagtcctgcacctgtcctgtgggatatggagggcagttttgtgagatgtgcctctcaggttacagaagagaaactcctaatcttggaccatacagtccatgtgtgctttgcgcctgcaatggacacagcgagacctgtgatcctgagacaggtgtttgtaactgcagagacaatacggctggcccgcactgtgagaagtgcagtgatgggtactatggagattcaactgcaggcacctcctccgattgccaaccctgtccgtgtcctggaggttcaagttgtgctgttgttcccaagacaaaggaggtggtgtgcaccaactgtcctactggcaccactggtaagagatgtgagctctgtgatgatggctactttggagaccccctgggtagaaacggccctgtgagactttgccgcctgtgccagtgcagtgacaacatcgatcccaacgcagttggaaattgcaatcgcttgacgggagaatgcctgaagtgcatctataacactgctggcttctattgtgaccggtgcaaagacggattttttggaaatcccctggctcccaatccagcagacaaatgcaaagcctgcaattgcaatccgtatgggaccatgaagcagcagagcagctgtaaccccgtgacggggcagtgtgaatgtttgcctcacgtgactggccaggactgtggtgcttgtgaccctggattctacaatctgcagagtgggcaaggctgtgagaggtgtgactgccatgccttgggctccaccaatgggcagtgtgacatccgcaccggccagtgtgagtgccagcccggcatcactggtcagcactgtgagcgctgtgaggtcaaccactttgggtttggacctgaaggctgcaaaccctgtgactgtcatcctgagggatctctttcacttcagtgcaaagatgatggtcgctgtgaatgcagagaaggctttgtgggaaatcgctgtgaccagtgtgaagaaaactatttctacaatcggtcttggcctggctgccaggaatgtccagcttgttaccggctggtaaaggataaggttgctgatcatagagtgaagctccaggaattagagagtctcatagcaaaccttggaactggggatgagatggtgacagatcaagccttcgaggatagactaaaggaagcagagagggaagttatggacctccttcgtgaggcccaggatgtcaaagatgttgaccagaatttgatggatcgcctacagagagtgaataacactctgtccagccaaattagccgtttacagaatatccggaataccattgaagagactggaaacttggctgaacaagcgcgtgcccatgtagagaacacagagcggttgattgaaatcgcatccagagaacttgagaaagcaaaagtcgctgctgccaatgtgtcagtcactcagccagaatctacaggggacccaaacaacatgactcttttggcagaagaggctcgaaagcttgctgaacgtcataaacaggaagctgatgacattgttcgagtggcaaagacagccaatgatacgtcaactgaggcatacaacctgcttctgaggacactggcaggagaaaatcaaacagcatttgagattgaagagcttaataggaagtatgaacaagcgaagaacatctcacaggatctggaaaaacaagctgcccgagtacatgaggaggccaaaagggccggtgacaaagctgtggagatctatgccagcgtggctcagctgagccctttggactctgagacactggagaatgaagcaaataacataaagatggaagctgagaatctggaacaactgattgaccagaaattaaaagattatgaggacctcagagaagatatgagagggaaggaacttgaagtcaagaaccttctggagaaaggcaagactgaacagcagaccgcagaccaactcctagcccgagctgatgctgccaaggccctcgctgaagaagctgcaaagaagggacgggataccttacaagaagctaatgacattctcaacaacctgaaagattttgataggcgcgtgaacgataacaagacggccgcagaggaggcactaaggaagattcctgccatcaaccagaccatcactgaagccaatgaaaagaccagagaagcccagcaggccctgggcagtgctgcggcggatgccacagaggccaagaacaaggcccatgaggcggagaggatcgcaagcgctgtccaaaagaatgccaccagcaccaaggcagaagctgaaagaacttttgcagaagttacagatctggataatgaggtgaacaatatgttgaagcaactgcaggaagcagaaaaagagctaaagagaaaacaagatgacgctgaccaggacatgatgatggcagggatggcttcacaggctgctcaagaagccgagatcaatgccagaaaagccaaaaactctgttactagcctcctcagcattattaatgacctcttggagcagctggggcagctggatacagtggacctgaataagctaaacgagattgaaggcaccctaaacaaagccaaagatgaaatgaaggtcagcgatcttgataggaaagtgtctgacctggagaatgaagccaagaagcaggaggctgccatcatggactataaccgagatatcgaggagatcatgaaggacattcgcaatctggaggacatcaggaagaccttaccatctggctgcttcaacaccccgtccattgaaaagccctagtgtctttagggctggaaggcagcatccctctgacaggggggcagttgtgaggccacagagtgccttgacacaaagattacatttttcagacccccactcctctgctgctgtccatcactgtccttttgaaccaggaaaagtcacagagtttaaagagaagcaaattaaacatcctgaatcgggaacaaagggttttatctaataaagtgtctcttccatcacgttgctaccttacccacacttccctctgatttgcgtgaggacgtggcatcctacttacgtacgtggcataacacatcgtgtgagcccatgtatgctggggtagagcaagtagccctcccctgtctcatcgatccagcagaacctcctcagtctcagtactcttgtttctataaggaaaagttttgctactaacagtagcattgtgatggccagtatatccagtccatggataaagaaaatgcatctgcatctcctgcccctcttccttctaagcaaaaggaaataaacatcctgtgccaaaggtattggtcatttagaatgtcggtagccatccatcagtgcttttagctattatgagtgtaggacactgagccatccgtgggtcaggatgcaattatttataaaagtccccaggtgaacatggctgaagatttttctagtatattaataattgactaggaagatgaactttttttcagatctttgggcagctgataatttaaatctggatgggcagcttgcactcaccaatagaccaaaagacatcttttgatattcttataaatggaacttacacagaagaaatagggatatgataaccactaaagttttgttttcaaaatcaaactaattcttacagcttttttattagttagtcttggaactagtgttaagtatctggcagagaacagttaatccctaaggtcttgacaaaacagaagaaaaacaagcctcctcgtcctagtcttttctagcaaagggataaaacttagatggcagcttgtactgtcagaatcccgtgtatccatttgttcttctgttggagagatgagacatttgacccttagctccagttttcttctgatgtttccatcttccagaatccctcaaaaaacattgtttgccaaatcctggtggcaaatacttgcactcagtatttcacacagctgccaacgctatcgagttcctgcactttgtgatttaaatccactctaaaccttccctctaagtgtagagggaagacccttacgtggagtttcctagtgggcttctcaacttttgatcctcagctctgtggttttaagaccacagtgtgacagttccctgccacacacccccttcctcctaccaacccacctttgagattcatatatagcctttaacactatgcaactttgtactttgcgtagcaggggctggggtggggggaaagaaacctattatcatggacacactggtgctattaattatttcaaatttatatttttgtgtgaatgttttgtgttttgtttatccatgctatagaacaaggaatttatgtagatatacttagtcctatttctagaatgacactctgttcactttgctcaatttttcctcttcactggcacaagtatctgaatacctccttccctcccttctagagttctttggattgtactccaaagaattgtgccttgtgtttgcagcatctccattctctaaattaatataattgctttcctccacacccagccacgtaaagaggtaacttgggtcctcttccattgcagtcctgatgatcctaacctgcagcacggtggttttacaatgttccagagcaggaacgccaggttgacaagctatggtaggattaggaaagtttgctgaagaggatctttgacgccacagtgggactagccaggaatgagggagaaatgccctttttggcaattgttggagctggataggtaagttttataagggagtacattttgactgagcacttagggcatcaggaacagtgctacttactggtgggtagactgggagaggtggtgtaacttagttcttgatgatcccacttcctgtttccatctgcttgggatataccagagtttaccacaagtgttttgacgatatactcctgagctttcactctgctggcttctcccaggcctcttctactatggcaggagatgtggtgtgctgttgcaaagttttcacgtcatcgtttcctggctagttcatttcattaagtggctacatcctaacatatgcattggtcaaggttgcagcaagaggactgaagattgactgccaagctagtttgggtgaagttcactccagcaagtctcaggccacaatggggtggtttggtttggtttccttttaactttctttttgttatttgcttttctcctccacctgtgtggtatattttttaagcagaattttattttttaaaataaaaggttctttacaagatgataccttaattacactcccgcaacacagccattattttattgtctagctccagttatctgtattttatgtaatgtaattgacaggatggctgctgcagaatgctggttgacacagggattattatactgctatttttccctgaattcttttccttggaattccaactgtggaccttttatatgtgccttcactttagctgtttgccttactctacagccttgctctccggggtggttaataaaatgcaacacttggcatttttatgttataagaaaaacagtattttatttataataaaatctgaatattttgtaacccttta

SEQ ID NO: 319 - DNA, 2185 bp, Homo sapiens
ctctgctttaattttctcagaattctctggactgaggctccagttctggcctttggggttcaagatcactgggaccaggccgtgatctctatgcccgagtctcaaccctcaactgtcaccccaaggcacttgggacgtcctggacagaccgagtcccgggaagccccagcactgccgctgccacactgccctgagcccaaatgggggagtgagaggccatagctgtctggcatgggcctctccaccgtgcctgacctgctgctgccactggtgctcctggagctgttggtgggaatatacccctcaggggttattggactggtccctcacctaggggacagggagaagagagatagtgtgtgtccccaaggaaaatatatccaccctcaaaataattcgatttgctgtaccaagtgccacaaaggaacctacttgtacaatgactgtccaggcccggggcaggatacggactgcagggagtgtgagagcggctccttcaccgcttcagaaaaccacctcagacactgcctcagctgctccaaatgccgaaaggaaatgggtcaggtggagatctcttcttgcacagtggaccgggacaccgtgtgtggctgcaggaagaaccagtaccggcattattggagtgaaaaccttttccagtgcttcaattgcagcctctgcctcaatgggaccgtgcacctctcctgccaggagaaacagaacaccgtgtgcacctgccatgcaggtttctttctaagagaaaacgagtgtgtctcctgtagtaactgtaagaaaagcctggagtgcacgaagttgtgcctaccccagattgagaatgttaagggcactgaggactcaggcaccacagtgctgttgcccctggtcattttctttggtctttgccttttatccctcctcttcattggtttaatgtatcgctaccaacggtggaagtccaagctctactccattgtttgtgggaaatcgacacctgaaaaagagggggagcttgaaggaactactactaagcccctggccccaaacccaagcttcagtcccactccaggcttcacccccaccctgggcttcagtcccgtgcccagttccaccttcacctccagctccacctatacccccggtgactgtcccaactttgcggctccccgcagagaggtggcaccaccctatcagggggctgaccccatccttgcgacagccctcgcctccgaccccatccccaacccccttcagaagtgggaggacagcgcccacaagccacagagcctagacactgatgaccccgcgacgctgtacgccgtggtggagaacgtgcccccgttgcgctggaaggaattcgtgcggcgcctagggctgagcgaccacgagatcgatcggctggagctgcagaacgggcgctgcctgcgcgaggcgcaatacagcatgctggcgacctggaggcggcgcacgccgcggcgcgaggccacgctggagctgctgggacgcgtgctccgcgacatggacctgctgggctgcctggaggacatcgaggaggcgctttgcggccccgccgccctcccgcccgcgcccagtcttctcagatgaggctgcgcccctgcgggcagctctaaggaccgtcctgcgagatcgccttccaaccccacttttttctggaaaggaggggtcctgcaggggcaagcaggagctagcagccgcctacttggtgctaacccctcgatgtacatagcttttctcagctgcctgcgcgccgccgacagtcagcgctgtgcgcgcggagagaggtgcgccgtgggctcaagagcctgagtgggtggtttgcgaggatgagggacgctatgcctcatgcccgttttgggtgtcctcaccagcaaggctgctcgggggcccctggttcgtccctgagcctttttcacagtgcataagcagttttttttgtttttgttttgttttgtttgtttttaaatcaatcatgttacactaatagaaacttggcactcctgtgccctctgcctggacaagcacatagcaagctgaactgtcctaaggcaggggcgagcacggaacaatggggccttcagctggagctgtggacttttgtacatacactaaaattctgaagttaaagctctgctcttggaaaaaaaaaaaaaaaaaaaaaaaaaaaaaaaaa

SEQ ID NO: 320 - DNA, 3166 bp, Homo sapiens
ggcgcggcaggaggacgaggcagggcgggcgggcgctctaagggttctgctctgactccaggttgggacagcgtcttcgctgctgctggatagtcgtgttttcggggatcgaggatactcaccagaaaccgaaaatgccgaaaccaatcaatgtccgagttaccaccatggatgcagagctggagtttgcaatccagccaaatacaactggaaaacagctttttgatcaggtggtaaagactatcggcctccgggaagtgtggtactttggcctccactatgtggataataaaggatttcctacctggctgaagctggataagaaggtgtctgcccaggaggtcaggaaggagaatcccctccagttcaagttccgggccaagttctaccctgaagatgtggctgaggagctcatccaggacatcacccagaaacttttcttcctccaagtgaaggaaggaatccttagcgatgagatctactgcccccctgagactgccgtgctcttggggtcctacgctgtgcaggccaagtttggggactacaacaaagaagtgcacaagtctgggtacctcagctctgagcggctgatccctcaaagagtgatggaccagcacaaacttaccagggaccagtgggaggaccggatccaggtgtggcatgcggaacaccgtgggatgctcaaagataatgctatgttggaatacctgaagattgctcaggacctggaaatgtatggaatcaactatttcgagataaaaaacaagaaaggaacagacctttggcttggagttgatgcccttggactgaatatttatgagaaagatgataagttaaccccaaagattggctttccttggagtgaaatcaggaacatctctttcaatgacaaaaagtttgtcattaaacccatcgacaagaaggcacctgactttgtgttttatgccccacgtctgagaatcaacaagcggatcctgcagctctgcatgggcaaccatgagttgtatatgcgccgcaggaagcctgacaccatcgaggtgcagcagatgaaggcccaggcccgggaggagaagcatcagaagcagctggagcggcaacagctggaaacagagaagaaaaggagagaaaccgtggagagagagaaagagcagatgatgcgcgagaaggaggagttgatgctgcggctgcaggactatgaggagaagacaaagaaggcagagagagagctctcggagcagattcagagggccctgcagctggaggaggagaggaagcgggcacaggaggaggccgagcgcctagaggctgaccgtatggctgcactgcgggctaaggaggagctggagagacaggcggtggatcagataaagagccaggagcagctggctgcggagcttgcagaatacactgccaagattgccctcctggaagaggcgcggaggcgcaaggaggatgaagttgaagagtggcagcacagggccaaagaagcccaggatgacctggtgaagaccaaggaggagctgcacctggtgatgacagcacccccgcccccaccaccccccgtgtacgagccggtgagctaccatgtccaggagagcttgcaggatgagggcgcagagcccacgggctacagcgcggagctgtctagtgagggcatccgggatgaccgcaatgaggagaagcgcatcactgaggcagagaagaacgagcgtgtgcagcggcagctgctgacgctgagcagcgagctgtcccaggcccgagatgagaataagaggacccacaatgacatcatccacaacgagaacatgaggcaaggccgggacaagtacaagacgctgcggcagatccggcagggcaacaccaagcagcgcatcgacgagttcgaggccctgtaacagccaggccaggaccaagggcagaggggtgctcatagcgggcgctgccagccccgccacgcttgtgtctttagtgctccaagtctaggaactccctcagatcccagttcctttagaaagcagttacccaacagaaacattctgggctgggaaccagggaggcgccctggtttgttttccccagttgtaatagtgccaagcaggcctgattctcgcgattattctcgaatcacctcctgtgttgtgctgggagcaggactgattgaattacggaaaatgcctgtaaagtctgagtaagaaacttcatgctggcctgtgtgatacaagagtcagcatcattaaaggaaacgtggcaggacttccatctgtgccatacttgttctgtattcgaaatgagctcaaattgattttttaatttctatgaaggatccatctttgtatatttacatgcttagaggggtgaaaattattttggaaattgagtctgaagcactctcgcacacacagtgattccctcctcccgtcactccacgcagctggcagagagcacagtgatcaccagcgtgagtggtggaggaggacacttggatttttttttttgttttttttttttttgcttaacagttttagaatacattgtacttatacaccttattaatgatcagctatatactatttatatacaagtgataatacagatttgtaacattagttttaaaaagggaaagttttgttctgtatattttgttaccttttacagaataaaagaattacatatgaaaaaccctctaaaccatggcacttgatgtgatgtggcaggagggcagtggtggagctggacctgcctgctgcagtcacgtgtaaacaggattattattagtgttttatgcatgtaatggactatgcacacttttaattttgtcagattcacacatgccactatgagctttcagactccagctgtgaagagactctgtttgcttgtgtttgtttgtttgcagtctctctctgccatggccttggcaggctgctggaaggcagcttgtggaggccgttggttccgcccactcattccttctcgtgcactgctttctccttcacagctaagatgccatgtgcaggtggattccatgccgcagacatgaaataaaagctttgcaaaggcacgaaaaaaaaaaaaaaaaaaaaaaaaaaaaaaaaaaaaaaaaaaaaaaaaaaaaaaaaaaaaaaaaaaaaaaaaaaaaaaaaaaaaaaaaaaaaaaaaaaaaaaa

SEQ ID NO: 321 - DNA, 2561 bp, Homo sapiens
tacccagcctgtcgctaaactttccgggcgccagcccggctctgagtcgcgcttctcagcggagtgacccagggacggaggacccaggctggctggggactgtctgctcttctcggcgggatccgtggagagtcctttccctggaatccgagccctaaccgtctctccccagccctatccggcgaggagcggagcgctgccagcggaggcagcgccttcccgaagcagtttatctttggacggttttctttaaaggaaaaagcaaccaacaggttgccagccccggcgccacacacgagacgccggagggagaagccccggcccggattcctctgcctgtgtgcgtccctcgcgggctgctggaggcgaggggagggagggggcgatggctcggcctgacccatccgcgccgccctcgctgttgctgctgctcctggcgcagctggtgggccgggcggccgccgcgtccaaggccccggtgtgccaggaaatcacggtgcccatgtgccgcggcatcggctacaacctgacgcacatgcccaaccagttcaaccacgacacgcaggacgaggcgggcctggaggtgcaccagttctggccgctggtggagatccaatgctcgccggacctgcgcttcttcctatgctctatgtacacgcccatctgtctgcccgactaccacaagccgctgccgccctgccgctcggtgtgcgagcgcgccaaggccggctgctcgccgctgatgcgccagtacggcttcgcctggcccgagcgcatgagctgcgaccgcctcccggtgctgggccgcgacgccgaggtcctctgcatggattacaaccgcagcgaggccaccacggcgccccccaggcctttcccagccaagcccacccttccaggcccgccaggggcgccggcctcggggggcgaatgccccgctgggggcccgttcgtgtgcaagtgtcgcgagcccttcgtgcccattctgaaggagtcacacccgctctacaacaaggtgcggacgggccaggtgcccaactgcgcggtaccctgctaccagccgtccttcagtgccgacgagcgcacgttcgccaccttctggataggcctgtggtcggtgctgtgcttcatctccacgtccaccacagtggccaccttcctcatcgacatggaacgcttccgctatcctgagcgccccatcatcttcctgtcagcctgctacctgtgcgtgtcgctgggcttcctggtgcgtctggtcgtgggccatgccagcgtggcctgcagccgcgagcacaaccacatccactacgagaccacgggccctgcactgtgcaccatcgtcttcctcctggtctacttcttcggcatggccagctccatctggtgggtcatcctgtcgctcacctggttcctggccgccggcatgaagtggggcaacgaggccatcgcgggctacgcgcagtacttccacctggctgcgtggctcatccccagcgtcaagtccatcacggcactggcgctgagctccgtggacggggacccagtggccggcatctgctacgtgggcaaccagaacctgaactcgctgcgcggcttcgtgctgggcccgctggtgctctacctgctggtgggcacgctcttcctgctggcgggcttcgtgtcgctcttccgcatccgcagcgtcatcaagcagggcggcaccaagacggacaagctggagaagctcatgatccgcatcggcatcttcacgctgctctacacggtccccgccagcattgtggtggcctgctacctgtacgagcagcactaccgcgagagctgggaggcggcgctcacctgcgcctgcccgggccacgacaccggccagccgcgcgccaagcccgagtactgggtgctcatgctcaagtacttcatgtgcctggtggtgggcatcacgtcgggcgtctggatctggtcgggcaagacggtggagtcgtggcggcgtttcaccagccgctgctgctgccgcccgcggcgcggccacaagagcgggggcgccatggccgcaggggactaccccgaggcgagcgccgcgctcacaggcaggaccgggccgccgggccccgccgccacctaccacaagcaggtgtccctgtcgcacgtgtaggaggctgccgccgagggactcggccggagagctgaggggaggggggcgttttgtttggtagttttgccaaggtcacttccgtttaccttcatggtgctgttgccccctcccgcggcgacttggagagagggaagaggggcgttttcgaggaagaacctgtcccaggtcttctccaaggggcccagctcacgtgtattctattttgcgtttcttactgccttctttatgggaaccctctttttaatttatatgtatttttcttaatttgtaactttgttgcattttggcaacaatttacctttgctttgggggctttacaatcctaaggttggcgttgtaatgaagttccacttggttcaggtttctttgaactgtgtggtctcaattgggaaaatatatttcctatacgtgtgtcttt

SEQ ID NO: 322 - DNA, 5633 bp, Homo sapiens
caggggcgcggcggggccggagagaggcggtcccctgggaggacggggtctcccctcgttgcctttgtagtggagaaggtggacaagtggcagtcggcgtgatcgcagggaagcggggccggcgcgggcggccgagggtccaggcgagcccgcgggcggacgggagatgccgctgctacaccgaaagccgtttgtgagacagaagccgcccgcggacctgcggcccgacgaggaagttttctactgtaaagtcaccaacgagatcttccgccactacgatgacttttttgaacgaaccattctgtgcaacagccttgtgtggagttgtgctgtgacgggtagacctggactgacgtatcaggaagcacttgagtcagaaaaaaaagcaagacagaatcttcagagttttccagaaccactaattattccagttttatacttgaccagccttacccatcgttcgcgcttacatgaaatttgtgatgatatctttgcatatgtcaaggatcgatattttgtcgaagaaactgtggaagtcattaggaacaatggtgcaaggttgcagtgtaggattttggaagtcctccctccatcacatcaaaatggttttgctaatggacatgttaacagtgtggatggagaaactattatcatcagtgatagtgatgattcagaaacacaaagctgttcttttcaaaatgggaagaaaaaagatgcaattgatcccttactattcaagtataaagtgcaacccactaaaaaagaattacatgagtctgctattgttaaagcaacacaaatcagccggagaaaacacctattttctcgtgataaactaaagctttttctgaagcaacactgtgaaccacaagatggagtcattaaaataaaggcatcatctctttcaacgtataaaatagcagaacaagatttttcttatttcttccctgatgatccacccacatttatcttcagtcctgctaacagacgaagagggagacctcccaaacgaatacatattagtcaagaggacaatgttgctaataaacagactcttgcaagttataggagcaaagctactaaagaaagagataaacttttgaaacaagaagaaatgaagtcactggcttttgaaaaggctaaattaaaaagagaaaaagcagatgccctagaagcgaagaaaaaagaaaaagaagataaagagaaaaagagggaagaattgaaaaaaattgttgaagaagagagactaaagaaaaaagaagaaaaagagaggcttaaagtagaaagagaaaaggaaagagagaagttacgtgaagaaaagcgaaagtatgtggaatacttaaaacagtggagtaaacctagagaagatatggaatgtgatgaccttaaggaacttccagaaccaacaccagtgaaaactagactacctcctgaaatctttggtgatgctctgatggttttggagttccttaatgcatttggggaactttttgatcttcaagatgagtttcctgatggagtaaccctagaagtattagaggaagctcttgtaggaaatgacagtgaaggcccactgtgtgaattgctttttttcttcctgactgcaatcttccaggcaatagctgaagaagaagaggaagtagccaaagagcaactaactgatgctgacaccaaagatttaacagaggctttggatgaagatgcagaccccacaaaatctgcactgtctgcagttgcatctttggcagctgcatggccacagttacaccagggctgcagtttgaaaagtttggatcttgatagctgcactctttcagacatcctcagactgcacatcttagcttcaggtgctgatgtaacatcagcaaatgcaaagtatagatatcaaaaacgaggaggatttgatgctacagatgatgcttgtatggagcttcgtttgagcaatcccagtctagtgaagaaactgtcaagcacctcagtgtatgatttgacaccaggagaaaaaatgaagatactccatgctctctgtggaaagctactgaccctagtttcaactagggattttattgaagattatgttgatatattacgacaggcaaagcaggagttccgggaattaaaagcagaacaacatcgaaaagagagggaagaagcagctgccagaattcgtaaaaggaaggaagaaaaacttaaggagcaagaacaaaaaatgaaagagaaacaagaaaaactgaaagaagatgagcaaagaaattcaacggcagatatatctattggggaggaagaaagggaagattttgatactagcattgagagcaaagacacagagcaaaaggaattagatcaagatatggtcactgaagatgaagatgacccaggatcacataaaagaggcagaagggggaaaagaggacaaaatggatttaaagaatttacaaggcaagaacagatcaactgtgtaacaagagagcctcttactgctgatgaggaagaagcattaaaacaggaacaccaacgaaaagagaaagagctcttagaaaaaatccaaagtgccatagcctgtaccaatatctttcccttgggtcgcgaccgcatgtatagacgatactggattttcccttctattcctggactctttattgaagaggattattctggtcttactgaagacatgctgttgcctagaccttcatcatttcagaataatgtacagtctcaagatcctcaggtatccactaaaactggagagcctttgatgtctgaatctacctccaacattgaccaaggtccacgtgaccattctgtgcagctgccaaaaccagtgcataagccaaatcggtggtgcttttacagttcttgtgaacagctagaccagcttattgaagctcttaattctagaggacatagagaaagtgccttaaaagaaactttgttacaagagaaaagcagaatatgtgcacagctagcccgtttttctgaagagaaatttcatttttcagacaaacctcagcctgatagcaaaccaacatatagtcggggaagatcttccaatgcatatgatccatctcagatgtgtgcagaaaagcaacttgaactaaggctgagagattttcttttagatattgaagatagaatctaccaaggaacattaggagccatcaaggttacagatcgacatatctggagatcagcattagaaagtggacggtatgagctgttaagtgaggaaaacaaggaaaatgggataattaaaactgtgaatgaagacgtagaagagatggaaattgatgaacaaacaaaggtcatagtaaaagacagacttttggggataaaaacagaaactccaagtactgtatcaacaaatgcaagtacaccacaatcagtgagcagtgtggttcattatctggcaatggcactctttcaaatagagcagggcattgagcggcgttttctgaaagctccacttgatgccagtgacagtgggcgttcttataaaacagttctggaccgttggagagagtctctcctttcttctgctagtctatcccaagtttttcttcacctatccaccttggatcgtagcgtgatatggtctaaatctatactgaatgcgcgttgcaagatatgtcgaaagaaaggcgatgctgaaaacatggttctttgtgatggctgtgataggggtcatcatacctactgtgttcgaccaaagctcaagactgtgcctgaaggagactggttttgtccagaatgtcgaccaaagcaacgttctagaagactctcctctagacagagaccatccttggaaagtgatgaagatgtggaagacagtatgggaggtgaggatgatgaagttgatggcgatgaagaagaaggtcaaagtgaggaggaagagtatgaggtagaacaagatgaagatgactctcaagaagaggaagaagtcagcctacccaaacgaggaagaccacaagttagattgccagttaaaacaagagggaaacttagctcttctttctctagtcgtggccaacaacaagaacctggaagatacccttcaaggagtcagcagagcacacccaaaacaactgtttcttctaaaactggtagaagcctaagaaagataaactctgctcctcctacagaaacaaaatctttaagaattgccagtcgttctactcgccacagtcatggcccactgcaagcagatgtatttgtggaattgcttagtcctcgtagaaaacgcagaggcaggaaaagtgctaataaaacaccagaaaatagtcccaacttccctaacttcagagtcattgccacaaagtcaagtgaacagtcaagatctgtaaatattgcttcaaaactttctctccaagagagtgaatccaaaagaagatgcaaaaaaagacaatctccagagccatcgcctgtgacactgggtcgaaggagttctggccgacagggaggagttcatgaattgtctgcttttgaacaacttgttgtagaattggtacgacatgatgacagctggccttttttgaaacttgtttctaaaatccaggtcccagactactatgacatcatcaaaaagcccattgccttaaatataattcgtgaaaaagtgaataagtgtgaatataaattagcatctgagtttattgatgacattgagttaatgttttcgaactgctttgaatacaaccctcgtaacacaagtgaagcaaaagctggaactaggcttcaagcattttttcatattcaggctcaaaagcttggactccacgtcacacccagtaatgtggaccaagttagcacaccaccggctgcgaaaaagtcacgaatctgactttgtccttctaaaggatatatttgaagaaaaacaaattgttcatgaaaatggaacattaaatcatgctgtataaagcaataacaaacaattgattgaccacatgaaagtgtggcctgcactatattctcaattttaatattaagcactcaggagaatgtaggaaagatatcctttgctacagttttgttcagtatctaataagtttgatagatgtattggatacagtactggtttacagaggtttttgtacatttttgagatcattcatgtgtccagagatcttggaaaatattttttcacccacgatttattttgttattgatgatttttttttaaagtggtggtattaagggagagttatctacatggatgagtcttccgctatagcacagtttagaaaaggtgtttatgtcttaattaattgtttgagtacattctttcaacactacacatgaatgaatccaatcttataaccttgaagtgctgtaccagtgctggctgcaggtattaagtccaagtttattaactagatatttatttagtattgagagtaatttgtgaatttgttttgtatttataaaatttatacctgaaaaatgttccttaatgttttaaaccttttactgtgtttttattcctctaacttccttaatgatcaatcaaaaaaagtaacaccctccctttttcctgacagttctttcagctttacagaactgtattataagtttctatgtataactttttaactgtacaaataaaataacattttttcaaataaaaaaaaaaaaaaaaa

SEQ ID NO: 323 - DNA, 2605 bp, Homo sapiens
tacgtagggcagagaagtcatggcttctccgtccaaaggcaatgacttgttttcgcccgacgaggagggcccagcagtggtggccggaccaggcccggggctggggggcgccgcgggggccgcggaggagcgccgcgtcaaggtctccagcctgcccttcagcgtggaggcgctcatgtccgacaagaagccgcccaaggagtcgcccgctgtgcctcccgaaggcgcctcggccggggcccacctgcggccactgctgctgtcggggcaccgcgctcgggaagcgcacagccccgggccgctggtgaagcccttcgagaccgcctcggtcaagtcgggaaattcagaagatggagcggcgtggatgcaggaacccggccgatattcgccgccgccaagacatatgagccctaccacctgcaccctgaggaaacacaagaccaatcggaagccgcgcacgccctttaccacatcccagctcctcgccctggagcgcaagttccgtcagaaacagtacctctccattgcagagcgtgcagagttctccagctctctgaacctcacagagacccaggtcaaaatctggttccagaaccgaagcgccaaggcgaaaagactgcaggaggcggaactggaaaagctgaaaatggctgcaaaacctatgctaccctccagcttcagtctccccttccccatcagctcgcccctgcaggcagcgtccatatacgcagcatcctacccgttccatagacctgtgcttcccatcccgcccgtgggactctatgccacgccagtgggatatggcatgtaccacctgtcctaaggaagaccagatcaatagactccatgatggatgcttgtttcaaagggtttcctctccctctccacaaaggcatagccagccagtactcctgcgctgctaagccctcgacgttgcaccccaccccctctaacggctagctgacagggccacaccacatagctgaaatttcgttctgtaggcggaggcaccaagccctgcttttcttggtgtaacttccagagtccccccttttttcccttgcacaaaagcttggctctgatggtttttttggcatgatgtatatatatatatacgaaaaatactacagaccctttttatcagcagacgtaaaaattcaaattattttaaaaggcaaaatttatatacatatgtgctttttttctatatctcaccttcccaaaaagacacatgtgtaagtccatttgttgtattttcttaaagagggagacaaattcggaggagcgccgcgtcaaggtctccagcctgcccttcagcgtggaggcgctcatgtccgatttgcaaaaatgtgctaaagtcaatgatttttaccgggattattgacttctgcttatacaagaagccgcccaaggagtcgcccgctgtgcctcccgaaggcgcctcggccggcctgcggaaaaacaaaagaaaacagacacaatgcagcagccagaaaatattagatatggagagattatggccactgctgctgaccggccacggcgtccgggaagcgcacagccccgggccgctggtgatcaaagtgaacccacatcatatttctgcattttacttgcattaaaagaaacctctttataagcccttcgagaccgcctcggtcaagtcgggaaattcagaagatggagcggcgtggatgctacatacgttgttcctatctcccgcccacgcccacacatatttttaaagtttttaggaacccggccgatattcgccgccgccaagacatatgagccctaccacctgcaccctgacctttttaagaatatttttgtaagaccaatacctgggatgagaagaatccgtagactgccggaaacacaagaccaatcggaagccgcgcacgccctttaccacatcccagctcctcgccctggaggtgaggtagaaaaattagaaatacttcctaattcttctcaaggctgttggtaactttggagcgcaagttccgtcagaaacagtacctctccattgcagagcgtgcagagttctctatttcagataattggagagtaaaatgttaaaacctgtgagaggattgtacagctctctgaacctcacagacccaggtcaaaaggttctgagaaatactaggtacattcatcctcacagattgcaaaggtgctttgggtgggggtttagtaattttctgcttaaaaaatgagtatcttgtaaccattacctatatctaaatattcttgaacaattagtagatccagaaagaaaaaaaaaatatgcttctctgtgtgtgtacctgttgtatgtcctaacttattagaaaaattttatatctttttacatgtggggggcagaaggtaaagcatgtttgacttgtgaaaatgggatgtcaaacagccataagttccctggtattcaccttcctgtccatctgtcccctccatcggtatacctttatccctttgaaagggtgcttgtacaatttgatatattttattgaagagttatctcttattctgaattaaattaagcatttgttttattctgaattaaattaagcatttgttttattgcagtaaagtttgtcca

SEQ ID NO: 324 - DNA, 2010 bp, Homo sapiens
gtgctgccgcgggtcacgtgctgcggaggcttggggaggggcggcgaggcggggtttatagcccgggcgcccgcgggccccacgctttgaccgggtcgtggcagccggagtcgtcttcgggacgcgcctgctcttcgcctttcgctgcagtccgtcgatttctttctccaggaagaaaaatggcatccgttgcagttgatccacaaccgagtgtggtgactcgggtggtcaacctgcccttggtgagctccacgtatgacctcatgtcctcagcctatctcagtacaaaggaccagtatccctacctgaagtctgtgtgtgagatggcagagaacggtgtgaagaccatcacctccgtggccatgaccagtgctctgcccatcatccagaagctagagccgcaaattgcagttgccaatacctatgcctgtaaggggctagacaggattgaggagagactgcctattctgaatcagccatcaactcagattgttgccaatgccaaaggcgctgtgactggggcaaaagatgctgtgacgactactgtgactggggccaaggattctgtggccagcacgatcacaggggtgatggacaagaccaaaggggcagtgactggcagtgtggagaagaccaagtctgtggtcagtggcagcattaacacagtcttggggagtcggatgatgcagctcgtgagcagtggcgtagaaaatgcactcaccaaatcagagctgttggtagaacagtacctccctctcactgaggaagaactagaaaaagaagcaaaaaaagttgaaggatttgatctggttcagaagccaagttattatgttagactgggatccctgtctaccaagcttcactcccgtgcctaccagcaggctctcagcagggttaaagaagctaagcaaaaaagccaacagaccatttctcagctccattctactgttcacctgattgaatttgccaggaagaatgtgtatagtgccaatcagaaaattcaggatgctcaggataagctctacctctcatgggtagagtggaaaaggagcattggatatgatgatactgatgagtcccactgtgctgagcacattgagtcacgtactcttgcaattgcccgcaacctgactcagcagctccagaccacgtgccacaccctcctgtccaacatccaaggtgtaccacagaacatccaagatcaagccaagcacatgggggtgatggcaggcgacatctactcagtgttccgcaatgctgcctcctttaaagaagtgtctgacagcctcctcacttctagcaaggggcagctgcagaaaatgaaggaatctttagatgacgtgatggattatcttgttaacaacacgcccctcaactggctggtaggtcccttttatcctcagctgactgagtctcagaatgctcaggaccaaggtgcagagatggacaagagcagccaggagacccagcgatctgagcataaaactcattaaacctgcccctatcactagtgcatgctgtggccagacagatgacaccttttgttatgttgaaattaacttgctaggcaaccctaaattgggaagcaagtagctagtataaaggccctcaattgtagttgtttccagctgaattaagagctttaaagtttctggcattagcagatgatttctgttcacctggtaagaaaagaatgataggcttgtcagagcctatagccagaactcagaaaaaattcaaatgcacttatgttctcattctatggccattgtgttgcctctgttactgtttgtattgaataaaaacatcttcatgtgggctggggtagaaactggtgtctgctctggtgtgatctgaaaaggcgtcttcactgctttatctcatgatgcttgcttgtaaaacttgattttagtttttcatttctcaaataggaatactacctttgaattcaataaaattcactgcaggatagaccagttaaaaaaaaaaaaaaaaaaaaaaaaaaaaaaa

SEQ ID NO: 325 - DNA, 1420 bp, Homo sapiens
ggggctgctggagcttgggggctggtggcaggaacaagccctttccgaccccatggagctgtatgagacatccccctacttctaccaggaaccccgcttctatgatggggaaaactacctgcctgtccacctccagggcttcgaaccaccaggctacgagcggacggagctcaccctgagccccgaggccccagggccccttgaggacaaggggctggggacccccgagcactgtccaggccagtgcctgccgtgggcgtgtaaggtgtgtaagaggaagtcggtgtccgtggaccggcggcgggcggccacactgagggagaagcgcaggctcaagaaggtgaatgaggccttcgaggccctgaagagaagcaccctgctcaaccccaaccagcggctgcccaaggtggagatcctgcgcagtgccatccagtacatcgagcgcctccaggccctgctcagctccctcaaccaggaggagcgtgacctccgctaccggggcgggggcgggccccagccaggggtgcccagcgaatgcagctctcacagcgcctcctgcagtccagagtggggcagtgcactggagttcagcgccaacccaggggatcatctgctcacggctgaccctacagatgcccacaacctgcactccctcacctccatcgtggacagcatcacagtggaagatgtgtctgtggccttcccagatgaaaccatgcccaactgagattgtcttccaagccgggcatccttgcgagccccccaagctggccacagatgccactacttctgtagcaggggcctcctaagccaggctgccctgatgctaggaagccagctctggggtgccataggccagactatccccttcctcatccatgtaaggttaacccaccccccagcaagggactggacgccctcattcagctgcctccttagaggagagggcatccctttccagggaggtaaagcaggggaccagagcgccccctcgtgtatgccccagctcagggggcaaactcaggagcttcctttttatcataacgcggcctctaattccaccccccaagtgaaacggtttgagagacgccgtgccctgacctggacaagctgtgcacgtctcctgttctggtctcttcccgatgcagtggctggctggcctgccctgaattgagagagaagaagggggagaggaacagccctctgttcccaagtcctggggggccaaacttttgcagtgaatattgggaaccttccagtggttttatgttttgttttgtttcgtgtgttgtttgtaaagctgccatccgaccaaggtctcctgtgctgaagttgccggggacaggcagggaaaaggggttggggcctcttgggggtgatttcttttgttaacaaagcatcgtgtggttttgccggaatt

SEQ ID NO: 326 - DNA, 4333 bp, Homo sapiens
gagaaaatcaattggtttagaaggtttggactcacttgacaggttcagttggagacgatcataggtggctgctgtgacaaagggaaattgtgcttttccagcatgcttactgaccctgatttacctcaggagtttgaaaggatgtcttccaagcgaccagcctctccgtatggggaagcagatggagaggtagccatggtgacaagcagacagaaagtggaagaagaggagagtgacgggctcccagcctttcaccttcccttgcatgtgagttttcccaacaagcctcactctgaggaatttcagccagtttctctgctgacgcaagagacttgtggccataggactcccacttctcagcacaatacaatggaagttgatggcaataaagttatgtcttcatttgccccacacaactcatctacctcacctcagaaggcagaagaaggtgggcgacagagtggcgagtccttgtctagtacagccctgggaactcctgaacggcgcaagggcagtttagctgatgttgttgacaccttgaagcagaggaaaatggaagagctcatcaaaaacgagccggaagaaacccccagtattgaaaaactactctcaaaggactggaaagacaagcttcttgcaatgggatcggggaactttggcgaaataaaagggactcccgagagcttagctgagaaagaaaggcaactcatgggtatgatcaaccagctgaccagcctccgagagcagctgttggctgcccacgatgagcagaagaaactagctgcctctcagattgagaaacagcgtcagcaaatggagctggccaagcagcaacaagaacaaattgcaagacagcagcagcagcttctacagcaacaacacaaaatcaatttgctccagcaacagatccaggttcaaggtcagctgccgccattaatgattcccgtattccctcctgatcaacggacactggctgcagctgcccagcaaggattcctcctccctccaggcttcagctataaggctggatgtagtgacccttaccctgttcagctgatcccaactaccatggcagctgctgccgcagcaacaccaggcttaggcccactccaactgcagcagttatatgctgcccagctagctgcaatgcaggtatctccaggagggaagctgccaggcataccccaaggcaaccttggtgctgctgtatctcctaccagcattcacacagacaagagcacaaacagcccaccacccaaaagcaaggatgaagtggcacagccactgaacctatcagctaaacccaagacctctgatggcaaatcacccacatcacccacctctccccatatgccagctctgagaataaacagtggggcaggccccctcaaagcctctgtcccagcagcgttagctagtccttcagccagagttagcacaataggttacttaaatgaccatgatgctgtcaccaaggcaatccaagaagctcggcaaatgaaggagcaactccgacgggaacaacaggtgcttgatgggaaggtggctgttgtgaatagtctgggtctcaataactgccgaacagaaaaggaaaaaacaacactggagagtctgactcagcaactggcagttaaacagaatgaagaaggaaaatttagccatgcaatgatggatttcaatctgagtggagattctgatggaagtgctggagtctcagagtcaagaatttatagggaatcccgagggcgtggtagcaatgaaccccacataaagcgtccaatgaatgccttcatggtgtgggctaaagatgaacggagaaagatccttcaagcctttcctgacatgcacaactccaacatcagcaagatattgggatctcgctggaaagctatgacaaacctagagaaacagccatattatgaggagcaagcccgtctcagcaagcagcacctggagaagtaccctgactataagtacaagcccaggccaaagcgcacctgcctggtggatggcaaaaagctgcgcattggtgaatacaaggcaatcatgcgcaacaggcggcaggaaatgcggcagtacttcaatgttgggcaacaagcacagatccccattgccactgctggtgttgtgtaccctggagccatcgccatggctgggatgccctcccctcacctgccctcggagcactcaagcgtgtctagcagcccagagcctgggatgcctgttatccagagcacttacggtgtgaaaggagaggagccacatatcaaagaagagatacaggccgaggacatcaatggagaaatttatgatgagtacgacgaggaagaggatgatccagatgtagattatgggagtgacagtgaaaaccatattgcaggacaagccaactgataagggtcaaaagattgttgtgaccttaggacttaaagaagccctaactggttcatccttaccagtggccaagcacattaactttctcatacactgactgttactttaactgttagtcttaaatagttgggacatcagctgactaatagacctcagcctcaaaaggcttggaaagaaaaaacaaatacaacaagcaaacaacaatatcaacaacaagagattgaaataagctatgggtaaaataatgccagtaattcagctgctacatccaagcactgaagtcttacccgtcaacttttttttttttttaaataaactttatggctgtttgttctacaatgttctagaaattctcactcaggtacacagtgccaacaagtggcttgtgaatgtgttttgttgttttgtgctacaatttttaaaaagaaaaaagttttgttttgttttttggggtttctgggttttttccttttctttttctttcctttcattttttttctttgtaatgcacctgacagaaaaaaaagaaaaatgaatttctctttacttctctccaccttctccatctctctactttaaagatggaagtctgtgcatgaggggaaagagggaaaaagagcctgtttttaacttccttgctatccaccacaaaataagcaattattttctttagaggactttatctattgcacaccacactacatctttgagcaagtgccaaatttgtactgaagtgttgaccaagttcattttttctctttactttttccttttccttcttaagttaggacagtgttaaatcttagacaatcccttgaaaaacctgaaataccagcagctggtgagatttgacttttttttttaatggaaactgtaggtgctgttctcaggtgaaaagagagagagagagagagacataagaaatttagagaaaaatattttctgatcttggatttttgtgtgtatgtatgtatgtgattatggtactaataataggaataacgttggaccattgtgagttaaacccacatctggggatgaaatcccacatcctcccaagtgactggtctagaaataatcttgaccttgactttgcacttcaaatgacaacttaaccaagtatagggctcagaaattatatttttaaatgtctgattattattggatggatcaggtggccctgtgtaatagaggtgtgcatgtataacatggaagctactagcaaactgctcccagatgtcctttctccctggtcagttggttccattaacgtttgctacttagtgatttttgtttttcctgttgatattttgagcaaaacaatcattgttttcattgaatatatttggccattttttcagacaaatagaattagcttatttcttcaacattccatcctttcccgatcaggaaatgaaactgatgattttataaggtatttttcacccctccatgaagtgaggtggaggcctttagcatttcagaagtgtgggccatatgtagttcatgccataaaaagtaggatttaattaaaagtcattgcagcccaataaaatggagcctggctgcacccagggatccttgccactgctcttcccttgctgtcagattaatccactgaagtccaactttggttcaagcagagtatttgcaaagagcaacaactgaatgtgatgggactgcttatgtagattttgccagccaaatgccaaggcagttgtagggcctgtacaaataaatgcaaaatcatttcaagtcaattgccattatttgtattgaagtatcagatagatagtaaatactgcaactagtagcttgatgtgctatagttttcactccagtcatcattttcctatctcaccccccgaaacaccaccctaaagttggatttttacatataaataaaaaaagaatcccttttaaaaaaaaaaaaaaaaaa

SEQ ID NO: 327 - DNA, 9312 bp, Homo sapiens
atgccgccgctcctggcgcccctgctctgcctggcgctgctgcccgcgctcgccgcacgaggcccgcgatgctcccagcccggtgagacctgcctgaatggcgggaagtgtgaagcggccaatggcacggaggcctgcgtctgtggcggggccttcgtgggcccgcgatgccaggaccccaacccgtgcctcagcaccccctgcaagaacgccgggacatgccacgtggtggaccgcagaggcgtggcagactatgcctgcagctgtgccctgggcttctctgggcccctctgcctgacacccctggacaatgcctgcctcaccaacccctgccgcaacgggggcacctgcgacctgctcacgctgacggagtacaagtgccgctgcccgcccggctggtcagggaaatcgtgccagcaggctgacccgtgcgcctccaacccctgcgccaacggtggccagtgcctgcccttcgaggcctcctacatctgccactgcccacccagcttccatggccccacctgccggcaggatgtcaacgagtgtggccagaagcccgggctttgccgccacggaggcacctgccacaacgaggtcggctcctaccgctgcgtctgccgcgccacccacactggccccaactgcgagcggccctacgtgccctgcagcccctcgccctgccagaacgggggcacctgccgccccacgggcgacgtcacccacgagtgtgcctgcctgccaggcttcaccggccagaactgtgaggaaaatatcgacgattgtccaggaaacaactgcaagaacgggggtgcctgtgtggacggcgtgaacacctacaactgccgctgcccgccagagtggacaggtcagtactgtaccgaggatgtggacgagtgccagctgatgccaaatgcctgccagaacggcgggacctgccacaacacccacggtggctacaactgcgtgtgtgtcaacggctggactggtgaggactgcagcgagaacattgatgactgtgccagcgccgcctgcttccacggcgccacctgccatgaccgtgtggcctccttctactgcgagtgtccccatggccgcacaggtctgctgtgccacctcaacgacgcatgcatcagcaacccctgtaacgagggctccaactgcgacaccaaccctgtcaatggcaaggccatctgcacctgcccctcggggtacacgggcccggcctgcagccaggacgtggatgagtgctcgctgggtgccaacccctgcgagcatgcgggcaagtgcatcaacacgctgggctccttcgagtgccagtgtctgcagggctacacgggcccccgatgcgagatcgacgtcaacgagtgcgtctcgaacccgtgccagaacgacgccacctgcctggaccagattggggagttccagtgcatctgcatgcccggctacgagggtgtgcactgcgaggtcaacacagacgagtgtgccagcagcccctgcctgcacaatggccgctgcctggacaagatcaatgagttccagtgcgagtgccccacgggcttcactgggcatctgtgccagtacgatgtggacgagtgtgccagcaccccctgcaagaatggtgccaagtgcctggacggacccaacacttacacctgtgtgtgcacggaagggtacacggggacgcactgcgaggtggacatcgatgagtgcgaccccgacccctgccactacggctcctgcaaggacggcgtcgccaccttcacctgcctctgccgcccaggctacacgggccaccactgcgagaccaacatcaacgagtgctccagccagccctgccgccacgggggcacctgccaggaccgcgacaacgcctacctctgcttctgcctgaaggggaccacaggacccaactgcgagatcaacctggatgactgtgccagcagcccctgcgactcgggcacctgtctggacaagatcgatggctacgagtgtgcctgtgagccgggctacacagggagcatgtgtaacatcaacatcgatgagtgtgcgggcaacccctgccacaacgggggcacctgcgaggacggcatcaatggcttcacctgccgctgccccgagggctaccacgaccccacctgcctgtctgaggtcaatgagtgcaacagcaacccctgcgtccacggggcctgccgggacagcctcaacgggtacaagtgcgactgtgaccctgggtggagtgggaccaactgtgacatcaacaacaatgagtgtgaatccaacccttgtgtcaacggcggcacctgcaaagacatgaccagtggctacgtgtgcacctgccgggagggcttcagcggtcccaactgccagaccaacatcaacgagtgtgcgtccaacccatgtctgaaccagggcacgtgtattgacgacgttgccgggtacaagtgcaactgcctgctgccctacacaggtgccacgtgtgaggtggtgctggccccgtgtgcccccagcccctgcagaaacggcggggagtgcaggcaatccgaggactatgagagcttctcctgtgtctgccccacgggctggcaagcagggcagacctgtgaggtcgacatcaacgagtgcgttctgagcccgtgccggcacggcgcatcctgccagaacacccacggcggctaccgctgccactgccaggccggctacagtgggcgcaactgcgagaccgacatcgacgactgccggcccaacccgtgtcacaacgggggctcctgcacagacggcatcaacacggccttctgcgactgcctgcccggcttccggggcactttctgtgaggaggacatcaacgagtgtgccagtgacccctgccgcaacggggccaactgcacggactgcgtggacagctacacgtgcacctgccccgcaggcttcagcgggatccactgtgagaacaacacgcctgactgcacagagagctcctgcttcaacggtggcacctgcgtggacggcatcaactcgttcacctgcctgtgtccacccggcttcacgggcagctactgccagcacgatgtcaatgagtgcgactcacagccctgcctgcatggcggcacctgtcaggacggctgcggctcctacaggtgcacctgcccccagggctacactggccccaactgccagaaccttgtgcactggtgtgactcctcgccctgcaagaacggcggcaaatgctggcagacccacacccagtaccgctgcgagtgccccagcggctggaccggcctttactgcgacgtgcccagcgtgtcctgtgaggtggctgcgcagcgacaaggtgttgacgttgcccgcctgtgccagcatggagggctctgtgtggacgcgggcaacacgcaccactgccgctgccaggcgggctacacaggcagctactgtgaggacctggtggacgagtgctcacccagcccctgccagaacggggccacctgcacggactacctgggcggctactcctgcaagtgcgtggccggctaccacggggtgaactgctctgaggagatcgacgagtgcctctcccacccctgccagaacgggggcacctgcctcgacctccccaacacctacaagtgctcctgcccacggggcactcagggtgtgcactgtgagatcaacgtggacgactgcaatccccccgttgaccccgtgtcccggagccccaagtgctttaacaacggcacctgcgtggaccaggtgggcggctacagctgcacctgcccgccgggcttcgtgggtgagcgctgtgagggggatgtcaacgagtgcctgtccaatccctgcgacgcccgtggcacccagaactgcgtgcagcgcgtcaatgacttccactgcgagtgccgtgctggtcacaccgggcgccgctgcgagtccgtcatcaatggctgcaaaggcaagccctgcaagaatgggggcacctgcgccgtggcctccaacaccgcccgcgggttcatctgcaagtgccctgcgggcttcgagggcgccacgtgtgagaatgacgctcgtacctgcggcagcctgcgctgcctcaacggcggcacatgcatctccggcccgcgcagccccacctgcctgtgcctgggccccttcacgggccccgaatgccagttcccggccagcagcccctgcctgggcggcaacccctgctacaaccaggggacctgtgagcccacatccgagagccccttctaccgttgcctgtgccccgccaaattcaacgggctcttgtgccacatcctggactacagcttcgggggtggggccgggcgcgacatccccccgccgctgatcgaggaggcgtgcgagctgcccgagtgccaggaggacgcgggcaacaaggtctgcagcctgcagtgcaacaaccacgcgtgcggctgggacggcggtgactgctccctcaacttcaatgacccctggaagaactgcacgcagtctctgcagtgctggaagtacttcagtgacggccactgtgacagccagtgcaactcagccggctgcctcttcgacggctttgactgccagcgtgcggaaggccagtgcaaccccctgtacgaccagtactgcaaggaccacttcagcgacgggcactgcgaccagggctgcaacagcgcggagtgcgagtgggacgggctggactgtgcggagcatgtacccgagaggctggcggccggcacgctggtggtggtggtgctgatgccgccggagcagctgcgcaacagctccttccacttcctgcgggagctcagccgcgtgctgcacaccaacgtggtcttcaagcgtgacgcacacggccagcagatgatcttcccctactacggccgcgaggaggagctgcgcaagcaccccatcaagcgtgccgccgagggctgggccgcacctgacgccctgctgggccaggtgaaggcctcgctgctccctggtggcagcgagggtgggcggcggcggagggagctggaccccatggacgtccgcggctccatcgtctacctggagattgacaaccggcagtgtgtgcaggcctcctcgcagtgcttccagagtgccaccgacgtggccgcattcctgggagcgctcgcctcgctgggcagcctcaacatcccctacaagatcgaggccgtgcagagtgagaccgtggagccgcccccgccggcgcagctgcacttcatgtacgtggcggcggccgcctttgtgcttctgttcttcgtgggctgcggggtgctgctgtcccgcaagcgccggcggcagcatggccagctctggttccctgagggcttcaaagtgtctgaggccagcaagaagaagcggcgggagcccctcggcgaggactccgtgggcctcaagcccctgaagaacgcttcagacggtgccctcatggacgacaaccagaatgagtggggggacgaggacctggagaccaagaagttccggttcgaggagcccgtggttctgcctgacctggacgaccagacagaccaccggcagtggactcagcagcacctggatgccgctgacctgcgcatgtctgccatggcccccacaccgccccagggtgaggttgacgccgactgcatggacgtcaatgtccgcgggcctgatggcttcaccccgctcatgatcgcctcctgcagcgggggcggcctggagacgggcaacagcgaggaagaggaggacgcgccggccgtcatctccgacttcatctaccagggcgccagcctgcacaaccagacagaccgcacgggcgagaccgccttgcacctggccgcccgctactcacgctctgatgccgccaagcgcctgctggaggccagcgcagatgccaacatccaggacaacatgggccgcaccccgctgcatgcggctgtgtctgccgacgcacaaggtgtcttccagatcctgatccggaaccgagccacagacctggatgcccgcatgcatgatggcacgacgccactgatcctggctgcccgcctggccgtggagggcatgctggaggacctcatcaactcacacgccgacgtcaacgccgtagatgacctgggcaagtccgccctgcactgggccgccgccgtgaacaatgtggatgccgcagttgtgctcctgaagaacggggctaacaaagatatgcagaacaacagggaggagacacccctgtttctggccgcccgggagggcagctacgagaccgccaaggtgctgctggaccactttgccaaccgggacatcacggatcatatggaccgcctgccgcgcgacatcgcacaggagcgcatgcatcacgacatcgtgaggctgctggacgagtacaacctggtgcgcagcccgcagctgcacggagccccgctggggggcacgcccaccctgtcgcccccgctctgctcgcccaacggctacctgggcagcctcaagcccggcgtgcagggcaagaaggtccgcaagcccagcagcaaaggcctggcctgtggaagcaaggaggccaaggacctcaaggcacggaggaagaagtcccaggacggcaagggctgcctgctggacagctccggcatgctctcgcccgtggactccctggagtcaccccatggctacctgtcagacgtggcctcgccgccactgctgccctccccgttccagcagtctccgtccgtgcccctcaaccacctgcctgggatgcccgacacccacctgggcatcgggcacctgaacgtggcggccaagcccgagatggcggcgctgggtgggggcggccggctggcctttgagactggcccacctcgtctctcccacctgcctgtggcctctggcaccagcaccgtcctgggctccagcagcggaggggccctgaatttcactgtgggcgggtccaccagtttgaatggtcaatgcgagtggctgtcccggctgcagagcggcatggtgccgaaccaatacaaccctctgcgggggagtgtggcaccaggccccctgagcacacaggccccctccctgcagcatggcatggtaggcccgctgcacagtagccttgctgccagcgccctgtcccagatgatgagctaccagggcctgcccagcacccggctggccacccagcctcacctggtgcagacccagcaggtgcagccacaaaacttacagatgcagcagcagaacctgcagccagcaaacatccagcagcagcaaagcctgcagccgccaccaccaccaccacagccgcaccttggcgtgagctcagcagccagcggccacctgggccggagcttcctgagtggagagccgagccaggcagacgtgcagccactgggccccagcagcctggcggtgcacactattctgccccaggagagccccgccctgcccacgtcgctgccatcctcgctggtcccacccgtgaccgcagcccagttcctgacgcccccctcgcagcacagctactcctcgcctgtggacaacacccccagccaccagctacaggtgcctgagcaccccttcctcaccccgtcccctgagtcccctgaccagtggtccagctcgtccccgcattccaacgtctccgactggtccgagggcgtctccagccctcccaccagcatgcagtcccagatcgcccgcattccggaggccttcaagtaaacggcgcgccccacgagaccccggcttcctttcccaagccttcgggcgtctgtgtgcgctctgtggatgccagggccgaccagaggagcctttttaaaacacatgtttttatacaaaataagaacgaggattttaattttttttagtatttatttatgtacttttattttacacagaaacactgcctttttatttatatgtactgttttatctggccccaggtagaaacttttatctattctgagaaaacaagcaagttctgagagccagggttttcctacgtaggatgaaaagattcttctgtgtttataaaatataaacaaagattcatgatttataaatgccatttatttattgattccttttttcaaaatccaaaaagaaatgatgttggagaagggaagttgaacgagcatagtccaaaaagctcctggggcgtccaggccgcgccctttccccgacgcccacccaaccccaagccagcccggccgctccaccagcatcacctgcctgttaggagaagctgcatccagaggcaaacggaggcaaagctggctcaccttccgcacgcggattaatttgcatctgaaataggaaacaagtgaaagcatatgggttagatgttgccatgtgttttagatggtttcttgcaagcatgcttgtgaaaatgtgttctcggagtgtgtatgccaagagtgcacccatggtaccaatcatgaatctttgtttcaggttcagtattatgtagttgttcgttggttatacaagttcttggtccctccagaaccaccccggccccctgcccgttcttgaaatgtaggcatcatgcatgtcaaacatgagatgtgtggactgtggcacttgcctgggtcacacacggaggcatcctacccttttctggggaaagacactgcctgggctgaccccggtggcggccccagcacctcagcctgcacagtgtcccccaggttccgaagaagatgctccagcaacacagcctgggccccagctcgcgggacccgaccccccgtgggctcccgtgttttgtaggagacttgccagagccgggcacattgagctgtgcaacgccgtgggctgcgtcctttggtcctgtccccgcagccctggcagggggcatgcggtcgggcaggggctggagggaggcgggggctgcccttgggccacccctcctagtttgggaggagcagatttttgcaataccaagtatagcctatggcagaaaaaatgtctgtaaatatgtttttaaaggtggattttgtttaaaaaatcttaatgaatgagtctgttgtgtgtcatgccagtgagggacgtcagacttggctcagctcggggagccttagccgcccatgcactggggacgctccgctgccgtgccgcctgcactcctcagggcagcctcccccggctctacgggggccgcgtggtgccatccccagggggcatgaccagatgcgtcccaagatgttgatttttactgtgttttataaaatagagtgtagtttacagaaaaagactttaaaagtgatctacatgaggaactgtagatgatgtatttttttcatcttttttgttaactgatttgcaataaaaatgatactgatggtgaaaaaaaaaaaaaaa

SEQ ID NO: 328 - DNA, 4530 bp, Homo sapiens
aattctcgagctcgtcgaccggtcgacgagctcgagggtcgacgagctcgagggcgcgcgcccggcccccacccctcgcagcaccccgcgccccgcgccctcccagccgggtccagccggagccatggggccggagccgcagtgagcaccatggagctggcggccttgtgccgctgggggctcctcctcgccctcttgccccccggagccgcgagcacccaagtgtgcaccggcacagacatgaagctgcggctccctgccagtcccgagacccacctggacatgctccgccacctctaccagggctgccaggtggtgcagggaaacctggaactcacctacctgcccaccaatgccagcctgtccttcctgcaggatatccaggaggtgcagggctacgtgctcatcgctcacaaccaagtgaggcaggtcccactgcagaggctgcggattgtgcgaggcacccagctctttgaggacaactatgccctggccgtgctagacaatggagacccgctgaacaataccacccctgtcacaggggcctccccaggaggcctgcgggagctgcagcttcgaagcctcacagagatcttgaaaggaggggtcttgatccagcggaacccccagctctgctaccaggacacgattttgtggaaggacatcttccacaagaacaaccagctggctctcacactgatagacaccaaccgctctcgggcctgccacccctgttctccgatgtgtaagggctcccgctgctggggagagagttctgaggattgtcagagcctgacgcgcactgtctgtgccggtggctgtgcccgctgcaaggggccactgcccactgactgctgccatgagcagtgtgctgccggctgcacgggccccaagcactctgactgcctggcctgcctccacttcaaccacagtggcatctgtgagctgcactgcccagccctggtcacctacaacacagacacgtttgagtccatgcccaatcccgagggccggtatacattcggcgccagctgtgtgactgcctgtccctacaactacctttctacggacgtgggatcctgcaccctcgtctgccccctgcacaaccaagaggtgacagcagaggatggaacacagcggtgtgagaagtgcagcaagccctgtgcccgagtgtgctatggtctgggcatggagcacttgcgagaggtgagggcagttaccagtgccaatatccaggagtttgctggctgcaagaagatctttgggagcctggcatttctgccggagagctttgatggggacccagcctccaacactgccccgctccagccagagcagctccaagtgtttgagactctggaagagatcacaggttacctatacatctcagcatggccggacagcctgcctgacctcagcgtcttccagaacctgcaagtaatccggggacgaattctgcacaatggcgcctactcgctgaccctgcaagggctgggcatcagctggctggggctgcgctcactgagggaactgggcagtggactggccctcatccaccataacacccacctctgcttcgtgcacacggtgccctgggaccagctctttcggaacccgcaccaagctctgctccacactgccaaccggccagaggacgagtgtgtgggcgagggcctggcctgccaccagctgtgcgcccgagggcactgctggggtccagggcccacccagtgtgtcaactgcagccagttccttcggggccaggagtgcgtggaggaatgccgagtactgcaggggctccccagggagtatgtgaatgccaggcactgtttgccgtgccaccctgagtgtcagccccagaatggctcagtgacctgttttggaccggaggctgaccagtgtgtggcctgtgcccactataaggaccctcccttctgcgtggcccgctgccccagcggtgtgaaacctgacctctcctacatgcccatctggaagtttccagatgaggagggcgcatgccagccttgccccatcaactgcacccactcctgtgtggacctggatgacaagggctgccccgccgagcagagagccagccctctgacgtccatcgtctctgcggtggttggcattctgctggtcgtggtcttgggggtggtctttgggatcctcatcaagcgacggcagcagaagatccggaagtacacgatgcggagactgctgcaggaaacggagctggtggagccgctgacacctagcggagcgatgcccaaccaggcgcagatgcggatcctgaaagagacggagctgaggaaggtgaaggtgcttggatctggcgcttttggcacagtctacaagggcatctggatccctgatggggagaatgtgaaaattccagtggccatcaaagtgttgagggaaaacacatcccccaaagccaacaaagaaatcttagacgaagcatacgtgatggctggtgtgggctccccatatgtctcccgccttctgggcatctgcctgacatccacggtgcagctggtgacacagcttatgccctatggctgcctcttagaccatgtccgggaaaaccgcggacgcctgggctcccaggacctgctgaactggtgtatgcagattgccaaggggatgagctacctggaggatgtgcggctcgtacacagggacttggccgctcggaacgtgctggtcaagagtcccaaccatgtcaaaattacagacttcgggctggctcggctgctggacattgacgagacagagtaccatgcagatgggggcaaggtgcccatcaagtggatggcgctggagtccattctccgccggcggttcacccaccagagtgatgtgtggagttatggtgtgactgtgtgggagctgatgacttttggggccaaaccttacgatgggatcccagcccgggagatccctgacctgctggaaaagggggagcggctgccccagccccccatctgcaccattgatgtctacatgatcatggtcaaatgttggatgattgactctgaatgtcggccaagattccgggagttggtgtctgaattctcccgcatggccagggacccccagcgctttgtggtcatccagaatgaggacttgggcccagccagtcccttggacagcaccttctaccgctcactgctggaggacgatgacatgggggacctggtggatgctgaggagtatctggtaccccagcagggcttcttctgtccagaccctgccccgggcgctgggggcatggtccaccacaggcaccgcagctcatctaccaggagtggcggtggggacctgacactagggctggagccctctgaagaggaggcccccaggtctccactggcaccctccgaaggggctggctccgatgtatttgatggtgacctgggaatgggggcagccaaggggctgcaaagcctccccacacatgaccccagccctctacagcggtacagtgaggaccccacagtacccctgccctctgagactgatggctacgttgcccccctgacctgcagcccccagcctgaatatgtgaaccagccagatgttcggccccagcccccttcgccccgagagggccctctgcctgctgcccgacctgctggtgccactctggaaagggccaagactctctccccagggaagaatggggtcgtcaaagacgtttttgcctttgggggtgccgtggagaaccccgagtacttgacaccccagggaggagctgcccctcagccccaccctcctcctgccttcagcccagccttcgacaacctctattactgggaccaggacccaccagagcggggggctccacccagcaccttcaaagggacacctacggcagagaacccagagtacctgggtctggacgtgccagtgtgaaccagaaggccaagtccgcagaagccctgatgtgtcctcagggagcagggaaggcctgacttctgctggcatcaagaggtgggagggccctccgaccacttccaggggaacctgccatgccaggaacctgtcctaaggaaccttccttcctgcttgagttcccagatggctggaaggggtccagcctcgttggaagaggaacagcactggggagtctttgtggattctgaggccctgcccaatgagactctagggtccagtggatgccacagcccagcttggccctttccttccagatcctgggtactgaaagccttagggaagctggcctgagaggggaagcggccctaagggagtgtctaagaacaaaagcgacccattcagagactgtccctgaaacctagtactgccccccatgaggaaggaacagcaatggtgtcagtatccaggctttgtacagagtgcttttctgtttagtttttactttttttgttttgtttttttaaagacgaaataaagacccaggggagaatgggtgttgtatggggaggcaagtgtggggggtccttctccacacccactttgtccatttgcaaatatattttggaaaac

SEQ ID NO: 329 - DNA, 9064 bp, Homo sapiens
atgaatggtcaccgttttacgttcagaactcgttcgcttctacctttacaaaagggacaacacagatgcattactaagctcttggctcataacgatccctggggtatattcagagccccttcctcgcggcgttcatatagtgtctcaggggtctgtcagccagcaatccccaattcctcattacatattcctcacaatgcatgctggctaaaatggaaattgtgttcagaaatagccctgccctaccatcatatactaggagaaaggaggaaattatgctctattagaaagtttgaagactggcgggaagatgtccgcagctgttgccaggccagggttctcccgagagggaggacgctgggactgtggcttgccctgatcggccgagaagagtttgccatgaatcttctgcgtcggagtgggaaacggcggcgttcagaatcaggctcagattcgttctcgggaagcggcggtgacagcagtgccagcccccagttcctctccgggtccgtgctgagcccgccgcccggccttggtcgctgcctgaaggccgcagctgcaggagaatgcaagcctacagttcctgactacgaaagagacaagctactattggcaaactggggacttcctaaagcagttctggaaaaataccacagttttggtgtaaaaaagatgtttgaatggcaggcagagtgccttttgcttggacaagtcctggaaggaaagaatttagtttattcagctcctacaagtgctgggaagactcttgtggcagaattacttattttgaagcgggttttggaaatgcggaagaaagctttgtttattcttccctttgtttctgtggctaaagagaagaaatactacctccagagtctgtttcaggaagtaggaataaaagtagacggttatatgggcagcacctctccatcaaggcatttctcttcattggatattgcagtctgcacaattgagagagccaatggtctgatcaatcgcctcatagaggaaaataagatggatctgttaggaatggtggttgtggatgaattacatatgctgggagactctcaccgagggtatctgctggaacttttgctgaccaagatttgctatattactcggaaatcagcatcttgtcaggcagatctagccagttctctgtctaatgctgtgcaaatcgttggcatgagtgctacccttcctaatttggagcttgtggcttcctggttgaatgctgaactctaccataccgactttcgccctgtaccgcttttggagtcagtaaaagttggaaattccatatatgactcttcaatgaaacttgtgagggaatttgagcccatgctacaagtgaagggagatgaggaccatgttgttagtttatgttatgagacgatttgtgataaccattcagtattacttttttgtccatcaaagaaatggtgtgagaagctggcagatatcattgctcgagagttttataatctacatcatcaagctgagggtgaaggattggtgaaaccctctgaatgcccaccagtaattctggaacaaaaagaactcctggaagtgatggatcagttaagacgtttgccttcaggactggactctgtattacagaaaactgtaccatggggagtagcatttcatcatgcaggtcttacttttgaggagagggatatcattgaaggagcctttcgtcaaggtctcattcgggtcttggcggcaacttctactctttcttctggggtgaatttacctgcacgtcgtgtgattattcgaacccctatttttggtggtcgacctctagatattcttacttataagcagatggttggccgtgctggcaggaaaggagtggacacagtaggcgagagtatcttaatttgtaagaactctgagaaatcaaaaggcatagctctccttcagggttctctaaagcctgttcgcagctgtctgcaaagacgagaaggagaagaagtaactggcagcatgatacgagctattctggagataatagttggtggagtggcaagtacatcacaagatatgcatacttatgctgcctgcacatttttggctgcaagtatgaaagaagggaagcaaggaattcagagaaatcaagagtctgttcagcttggagcgattgaggcctgtgtgatgtggctactagaaaatgaattcatccagagtacagaagccagtgatggaacagaaggaaaggtgtatcatccaacacatcttggttcggccactctttcttcttcactttctccagctgatactttagatatttttgctgacctgcaaagagcaatgaagggctttgttttagagaatgatcttcatattctctatctggttacacctatgtttgaggattggactactattgattggtatcgatttttctgtttatgggagaagttgccaacttcaatgaaaagggtggcagagctagtgggagttgaagaggggttcttggcccgttgtgtgaaaggaaaagtagtagccagaactgagagacagcatcgacaaatggccatccataaaaggtttttcaccagtcttgtgctattagatttaatcagtgaagttcccttaagggaaataaatcagaaatatggatgcaatcgtgggcagattcaatctttgcaacagtcagctgctgtttatgcagggatgattacagtattttccaaccgtctgggctggcacaacatggaactactactttcccaatttcagaagcgtcttacgtttggcatccagagggagctgtgtgacctggttcgggtatccttactaaatgctcagagagccagggttctctatgcttctggctttcatactgtggcagaccttgctagagcaaatattgtggaggtggaggtgattctgaaaaatgctgtgcctttcaaaagtgcccggaaggcagtggatgaggaagaggaagcagttgaagaacgtcgcaatatgcgaactatctgggtgactggcagaaaaggtttaactgaaagggaagcagcagcccttatagtggaagaagccagaatgattctgcagcaggacttagttgaaatgggagtgcaatggaatccatgtgccctgttacattctagtacatgctcattgactcatagtgagtccgaagtaaaggaacacacatttatatcccaaactaagagttcttataaaaaattaacatcaaagaacaaaagtaacacaatatttagtgattcttatattaagcattcaccaaatatagtgcaagacttaaataaaagtagagagcatacaagttcctttaattgtaatttccagaatgggaatcaagaacatcagacatgttccattttcagagcaagaaaacgggcctctttagatataaataaagagaagccaggagcctctcagaatgaggggaaaacaagtgataagaaagttgttcagactttttcacagaaaacaaaaaaggcacctttgaatttcaattcagaaaagatgagcagaagttttcgatcttggaaacgtagaaagcatctaaagcgatctagggacagcagccccctgaaagactctggagcgtgtagaatccatttacaaggacagactctgtctaatcctagtctttgtgaagacccgtttaccttagatgagaagaaaacggaatttagaaattcagggccatttgctaaaaatgtatctttgagtggtaaggaaaaagataataaaacatcattcccattacaaataaagcaaaattgttcatggaacataacactaactaatgataattttgtggagcatattgtcacaggatctcagagtaaaaatgtgacttgtcaggccactagtgtggttagtgaaaagggcagaggagtagctgttgaggcagaaaaaataaatgaagtgctgatacaaaatggttcaaaaaaccagaatgtttatatgaaacaccatgacatccatccaattaaccagtacctgcgaaagcaatctcatgaacagacaagcactattaccaaacagaaaaatataatagagagacaaatgccctgtgaagcagtcagtagttacataaatagagactcaaatgttactatcaattgtgaaaggataaagcttaatacagaggaaaataaaccaagtcattttcaggcattaggagatgatataagcagaactgtgatacccagtgaagtacttccatcagctggagcatttagcaaatcagaaggccagcatgagaattttctaaatatttctagactacaagaaaaaacaggtacttatacaacaaacaaaactaaaaataatcatgtttctgacttaggtttagtcctctgtgattttgaagatagtttctatctggatactcagtcagagaaaataatacaacagatggcaactgaaaatgccaaactaggagcaaaggacaccaacctggcagcagggataatgcagaagagcttagtccaacagaactcaatgaactcttttcagaaggagtgtcacattccttttcctgctgaacagcaccctctaggagcgactaagatagatcatttggaccttaagactgtaggtactatgaaacaaagcagtgattcacatggggttgatatcctgactccagaaagcccgattttccattctccaatactattggaggaaaatggtctttttttaaaaaagaatgaagtttctgttactgattcacaattaaatagttttcttcaaggttatcaaacacaagaaactgtgaaaccagttatacttctgattcctcaaaagagaactcccactggtgtagaaggagaatgtcttccagttcctgaaacaagtttgaatatgagtgatagtttactatttgatagcttcagtgatgactatctagtaaaagaacaattacctgatatgcaaatgaaagaaccccttccttcagaagtaacatcaaaccattttagtgattctctgtgtctacaagaagacctaattaaaaaatcaaatgtaaatgagaatcaagatacccaccagcagttgacttgttccaatgatgaatctattatattttcagaaatggattctgttcagatggttgaagctttggacaatgtggatatatttcctgtccaagagaagaatcatactgtagtatctcctagagcattagaactaagtgatccagtacttgatgagcaccaccaaggtgatcaagatggaggagatcaagatgaaagggctgaaaaatcaaaattaactgggaccaggcaaaatcattcattcatatggtcaggggcatcatttgatctaagtccaggactgcaaaggattttagataaagtatccagtcctctagaaaatgaaaagctaaaatcaatgactataaacttttccagtttgaatagaaaaaatacagagttaaatgaagaacaagaagttatttcaaacttggagacaaaacaagtgcagggaatttcattttcttctaataatgaagtaaaaagcaagattgagatgctagaaaacaatgccaatcatgatgaaacctcatccctcttacctcgtaaagaaagtaatatagttgatgataatggtctcattcctcctacacccattccaacatctgcttctaagctgacatttccagggattcttgaaacacctgtaaacccttggaaaactaataatgttttacaacctggtgaaagttatttatttggctcaccttcagatattaaaaaccacgatttaagtccagggagtagaaatgggttcaaagacaacagccctattagtgacacaagcttttcacttcagttatcacaggatggattacagttaactccagcctcaagcagttcagaaagtttgtccataattgatgtagcaagtgaccaaaatcttttccaaacattcattaaggagtggcggtgcaaaaagcgattttccatctcactggcttgtgaaaagattagaagtttgacatcttctaaaactgctactattggcagtaggtttaagcaagctagctcacctcaggaaattcctattagagatgatggatttcccattaaaggttgtgatgacaccttggtggttggactggcagtatgctggggtggaagggatgcctattatttttcactgcagaaggaacaaaagcattctgaaattagtgccagtttggttccaccttctttagatccaagcctgactttgaaagacaggatgtggtaccttcaatcttgcttgcgaaaggaatctgataaagaatgttctgttgtcatctatgacttcatccagagctataaaattcttcttctttcttgtggcatctccttggagcaaagttatgaagatcctaaggtggcatgctggttactagatccagattctcaggagccgactcttcatagcatagttaccagttttcttcctcatgagcttccactcctagaagggatggagaccagccaagggattcaaagcctggggctaaatgctggcagtgagcattctgggcgatacagagcatctgtggagtccattctcatcttcaactctatgaatcagctcaactctttgttgcagaaggaaaaccttcaagatgttttccgtaaggtggaaatgccctctcagtactgcttggccttgctagaactaaatggaattggctttagtactgcagaatgtgaaagtcagaaacatataatgcaagccaagctggatgcaattgagacccaggcctatcaactagctggccacagtttttctttcaccagttcagatgacatcgctgaggttttatttttggaattgaagttgcccccaaatagagagatgaaaaaccaaggcagcaagaaaactctgggttctaccagaagagggattgacaatggacgcaagctaaggctgggaagacagttcagcactagtaaggacgttttaaataaattaaaggcattacatcctttaccaggcttgatattagaatggagaagaatcactaatgctattaccaaagtggtctttccccttcagcgggaaaagtgtcttaatccttttcttggaatggaaagaatctatcctgtatcacagtcgcacactgctacaggacgaataacctttacagaaccaaatattcagaatgtgccaagagattttgaaatcaaaatgccaacactagtaggagaaagcccaccttctcaagctgtaggcaaaggcctacttcccatgggcagaggaaaatataagaagggtttcagcgtgaatcctagatgccaggcacagatggaggagagagctgcagacagaggaatgccattttcaattagcatgcgacatgcctttgtgcctttcccaggtggttcaatactggctgctgactactctcagcttgaactgaggatcttggctcatttatcccatgatcgtcgtctcattcaagtgttaaacactggagctgatgttttcaggagcattgcagcagagtggaagatgattgagccagagtctgttggggatgatctgaggcagcaggcaaaacagatttgctatgggatcatttatggaatgggagctaaatctttgggagagcagatgggcattaaagaaaatgatgctgcatgctatattgactccttcaaatccagatacacagggattaatcaattcatgacagagacagtgaagaattgtaaaagagacggatttgttcagaccattttgggaaggcgtagatatttgccaggaatcaaagacaacaacccttatcgtaaagctcacgctgagcgtcaagctatcaacacaatagtccaaggatcagcagctgatattgtcaaaatagccacagttaacattcagaagcaattagagaccttccactcaaccttcaaatcccatggtcatcgagagggtatgctccaaagtgaccaaacaggattgtcacgaaagagaaaactgcaagggatgttctgcccaatcagaggaggcttcttcatccttcaactccatgatgaactcctatatgaagtggcagaagaagatgttgttcaggtagctcagattgtcaagaatgaaatggaaagtgctgtaaaactgtctgtgaaattgaaagtgaaagtgaaaataggcgccagctggggagagctaaaggactttgatgtgtaactgtgctgttgatgaagtcctcccagggaagcctgtgcagatgcagtcacctggaaagaacagagattaccctttcacctacctcagcaaaacaaactttcaagtcttgatagacttagcctagtaattttatagtgagagtttcaaactatatatcagtgtctatagcatcaaaaacttctgggggcgtgggggaagtagaataccaagtataatagttacattcactttcaaagagcatctatgaatttgccttttgtaacttactgtggctttaaacatattcagaacagatgcttgaaatatgcacttagcactttggttccacatctgtctgggtaaaccatgaagaaaatgaagctgctgcctcaatcgacccagacagcagccataggcagataaagatttggtttcaccctggtggtggtaggcatcgtgtgtgactttttttcctctaatatcaattttacagtacggaaatagtattttaaaatagtattggctaataaattatgaattctataaagtagtaagacttggtatggttggagtgtaggaatgaatattcatgaaatgtttcttattgcttttccttccctaattcatacaatgaatgtatttggaatacttacatattataaaataaactatacctcttcaagaggtatcctgttctgtaagatcagatgtttttattgcaggtcaatataatactgccagagacagaaaatacccccttatcagtcccttagtgcctctttctgtttgtggcatggtgagaaaacccatgctgaaaagattgtactttgtgatcccaatcagagggatggagctaatctttttgctgttgaaataaaatgaatttatgagaaaaaaaaaaaaaaaa

SEQ ID NO: 330 - DNA, 1868 bp, Homo sapiens
ggaagcgagggtgcggcgcaatccggagaggacgccaggacgacgcccgagttccctttcaggctagaactcttcctttttctagcttggggtagaaggcggagccggagccccggaacccccgccctcggggtgcgaggcggcagcagggccgtcccctacatttgcatagcccctgggacgtggcgctgcacccaagcctcttctcagttggagggaactccaagtcccacagtgccacggggtggggtgcgtcactttcgctgcgttggaggctgaggagaattgagcctgggaggcgggtccggagagggctatggaaagccgccggcggggaatcccggccgtagagggacagtggataggtgcccgaggcctacagctggcctggggctcgtgtctgggcttcggacgttggggcccggtggcccaccctttccgtagttgtcccaaatggagctggaattggatgctggtgaccaagacctgctggccttcctgctagaggaaagtggagatttggggacggcacccgatgaggccgtgagggccccactggactgggcgctgccgctttctgaggtaccgagcgactgggaagtagatgatttgctgtgctccctgctgagtcccccagcgtcgttgaacattctcagctcctccaacccctgccttgtccaccatgaccacacctactccctcccacgggaaactgtctctatggatctagagagtgagagctgtagaaaagaggggacccagatgactccacagcatatggaggagctggcagagcaggagattgctaggctagtactgacagatgaggagaagagtctattggagaaggaggggcttattctgcctgagacacttcctctcactaagacagaggaacaaattctgaaacgtgtgcggaggaagattcgaaataaaagatctgctcaagagagccgcaggaaaaagaaggtgtatgttgggggtttagagagcagggtcttgaaatacacagcccagaatatggagcttcagaacaaagtacagcttctggaggaacagaatttgtcccttctagatcaactgaggaaactccaggccatggtgattgagatatcaaacaaaaccagcagcagcagcacctgcatcttggtcctactagtctccttctgcctcctccttgtacctgctatgtactcctctgacacaagggggagcctgccagctgagcatggagtgttgtcccgccagcttcgtgccctccccagtgaggacccttaccagctggagctgcctgccctgcagtcagaagtgccgaaagacagcacacaccagtggttggacggctcagactgtgtactccaggcccctggcaacacttcctgcctgctgcattacatgcctcaggctcccagtgcagagcctcccctggagtggccattccctgacctcttctcagagcctctctgccgaggtcccatcctccccctgcaggcaaatctcacaaggaagggaggatggcttcctactggtagcccctctgtcattttgcaggacagatactcaggctagatatgaggatatgtggggggtctcagcaggagcctggggggctccccatctgtgtccaaataaaaagcggtgggcaagggctggccgcagctcctgtgccctgtcaggacgactgagggctcaaacacaccacacttaatggctttctgggtcttttatttgtacccatgtgtctgtcacaccatgaatgtacctggggaaatcaactgacctccctgaacatttcacgcagtcagggaacaggtgaggaaagaaataaataagtgattctaatgctgcctaaaaaaaaaaaaaaaaaa

SEQ ID NO: 331 - DNA, 4427 bp, Homo sapiens
actagttctagctcgcgatctagaactagcgacccacgcgtccgggtccagctgagcctggtggcggaaaggctgcggccccgcgccagagggccggtggctcctccgggcttctgaggacccgcagggagcgggcctcatcatttctgtctcctgtttctccacttccttctctattggttggtccactgatgtatggacttgcacatgatgaactgtgaacttctagccacatgtagtgcccttgggtacttggagggagacacttaccataaggaaccagattgcttagagagcgtgaaggatctcatccgctatttgaggcatgaggatgagacacgagatgtgcggcagcagctgggggcagcccagatcctacagagcgaccttctgcccatcctcacccagcaccaccaggacaagcctctctttgatgctgttatcagactgatggtgaacttgacacaaccagccttgctctgttttggcaatctgcctaaggagcccagctttcggcaccattttttgcaggtgctaacttatttgcaggcctacaaagaggcctttgccagtgagaaggcttttggagtcctcagtgaaaccttgtatgagctgctgcagctgggctgggaggaacggcaggaggaagacaacttgctgattgaacggatcctactgctggtcagaaatattctccatgtcccagctgaccttgatcaggagaagaagattgatgatgacgccagtgcccatgaccagctcctctgggcgattcacctcagcggcctggatgacctgctcctctttctggccagctcgtctgctgaggagcaatggagcctacatgtgctagagattgtctcccttatgtttcgtgaccagaaccccgagcagctggcgggagtagggcagggacgcttagctcaggagcggagtgcagattttgcagaactggaggtgttgcgccagcgagagatggcagaaaagaagactcgagccctccagcgaggcaacaggcattctcgatttgggggctcctatattgtccaggggttgaaatccattggggagagggacctcatctttcacaaaggccttcacaacctacgaaactacagttcagatttgggaaagcagccgaaaaaggtgcctaaacgtcgccaggccgcccgagagctgtccattcagcgccgttctgccctcaatgtgaggctcttcctcagagacttctgctctgagttcctggagaactgttacaaccggctcatgggatcagtaaaggatcacctgcttcgggagaaagctcagcagcatgatgagacctattatatgtgggccttggctttcttcatggccttcaaccgagctgcctccttccggccaggcctggtttctgagaccctcagtgtccgtaccttccacttcattgagcagaacctcaccaactactatgagatgatgctgactgaccgcaaggaagctgcctcctgggcacgccggatgcacttggctctgaaggcctatcaggagctgctggcaacagtgaatgagatggacatatctccagatgaggctgtgagggagagcagccgcatcatcaagaacaatattttctatgtgatggagtaccgagaactattcctggcactttttcgaaagtttgatgagagatgccagccccgctctttccttcgtgacctggtggagaccacccacctcttcctcaaaatgttggagcgattctgtcggagccgtgggaacctggtggtgcagaacaaacaaaagaagagaaggaagaagaagaagaaggtcctagaccaggccattgtttctggtaatgtcccatctagcccagaagaagtggaggctgtgtggccagccctggctgagcagctacagtgctgtgcccagaattctgagctcagcatggactccgtggttccctttgatgcggcctcagaggtgccagtggaggagcagcgggcagaagctatggtacggatccaagactgtctcctggctggccaggccccacaggccctgactctcctgaggtctgctcgggaggtgtggcctgaaggagatgtgtttggctctcaagacatttctccagaggaagagatccagttgctgaaacaaatcctctctgctccacttccccggcagcagggcccagaggaacgtggggcagaggaagaagaagaggaggaggaggaggaagaggaggagttgcaagtggtccaggtgtcggagaaagaatttaattttctggactacctgaaacgctttgcatgttcaactgtcgttcgagcctatgtgctgctactaaggagctaccagcagaatagtgcccacactaaccattgcattgtgaagatgctgcaccggctggcccatgacctcaaaatggaagccctactttttcagctgtcagtcttctgcctcttcaatcgtctgcttagtgaccctgctgctggagcctacaaagagctagtgacttttgccaaatacatcctgggcaaattttttgcactggctgcagtcaaccaaaaagcctttgtggagctgttgttctggaagaacacagctgtggttcgagagatgactgagggctatggctccctggatgacaggtcttccagtcgcagagcacctacatggagccccgaagaagaggctcatcttcgggagctgtacctcgccaataaggacgtggaagggcaggatgtggtggaagccatcttggcccacctgaatactgttcctcgaacacgcaagcagatcatccaccatctggtacagatgggactggctgacagtgtcaaggacttccaaaggaaaggaacccatattgtactgtggacgggggatcaggagttggagctgcagcggctttttgaggaattccgggactcagatgatgtcctgggtcatatcatgaagaatatcacagccaaacgctcacgggcccgaatagtggataaactcttggctctggggctggtggctgagcggcgggagctgtacaagaaacggcagaaaaagttggcatcctccatcttgccaaatggagcggagtccctgaaagatttttgccaggaagatctggaagaagaggaaaacctgcctgaggaagacagcgaagaggaagaagaagggggctcagaagcagaacaagtccagggtagcttagtcctttcaaatgaaaaccttggtcaaagcctgcatcaggaaggcttttctatcctgctcctatggctccagaactgcctgatccgagcagctgatgatcgggaagaggatggctgctcccaggccgttccattggtgccactcacagaggaaaatgaggaagccatggaaaacgaacagtttcagcagctgttgcgcaagctaggggttcggccccctgcctctgggcaggaaaccttctggcgaattccagccaagctgagtcctacccagctccggagggcagcagcttctttgagtcaaccagaggaggaacagaagctgcagccagagctgcagcctaaagtccctggagagcaaggctctgatgaggagcactgtaaagagcaccgagcacaagccctgagggccctcttgctagcccacaagaagaaagcgggcctggcatccccagaggaggaagacgctgttggtaaagagccgctgaaggcagcacccaagaaacgacaattgctggacagcgacgaggaacaggaagaagatgagggcaggaacagagcaccagagttgggagctccaggaatccaaaagaagaaacgataccagattgaggatgatgaggatgactgaagagctaagaagcctaggggtagagatagacacgtttttagatggtgcattcaagtcagagttggaagggtcatacaggacccagaagctcctcttactggacagagcagtagaatcccaggctctttcacggatttaggctgagaaacttcagcagcagtattggacttctctgctgtcagtctttgtttctcccagtttttatcggtatgccccagcagctctctggagatttagttctcttcttctaggaaccatttcttttggttattggagctccttagcaaataagaggagtgagtgaaatagagaaagcaccccggaccccttttattggtctgttcctttggctttctcttggaggtgggtcgcagcaccagatggggagctttatgacatgacaggcgggagttttgtaccacttttagaagataccagatgcctctgtcctcattttgtttcctatgatcatcctctagataccagatagaggcccattcctgcatttgagatagggttggaatatagtactctagatgatgaatgtgtttgctttgtgtttggtattaaacatgtaagattagaagttcaaaaaaaaaaaaaaa

SEQ ID NO: 332 - DNA, 2682 bp, Homo sapiens
cccacgcgtccggcggcctccatctaagatctcttccccttgtccatagcctagatcgagctccctgtgtgcaccgcgcgctgcccgaggcgcaggtcaaccagaatcaagatgtctgggactgaggaagcaattcttggaggacgtgacagccatcctgctgctggcggcggctcagtgttatgctttggacagtgccagtacacagcagaagagtaccaggccatccagaaggccctgaggcagaggctgggcccagaatacataagtagccgcatggctggcggaggccagaaggtgtgctacattgagggtcatcgggtaattaatctggccaatgagatgtttggttacaatggctgggcacactccatcacgcagcagaatgtggattttgttgacctcaacaatggcaagttctacgtgggagtctgtgcatttgtgagggtccagctgaaggatggttcatatcatgaagatgttggttatggtgttagtgagggcctcaagtccaaggctttatctttggagaaggcaaggaaggaggcggtgacagacgggctgaagcgagccctcaggagttttgggaatgcacttggaaactgtattctggacaaagactacctgagatcactaaataagcttccacgccagttgcctcttgaagtggatttaactaaagcgaagagacaagatcttgaaccgtctgtggaggaggcaagatacaacagctgccgaccgaacatggccctgggacacccacagctgcagcaggtgacctccccttccagacccagccatgctgtgataccggcggaccaggactgcagctcccgaagcctgagctcatccgccgtggagagcgaggccacgcaccagcggaagctccggcagaagcagctgcagcagcagttccgggagcggatggagaagcagcaggttcgagtctccacgccgtcagctgagaagagtgaggcagcgcctccggcccctcctgtgacgcacagcactcctgtaactgtctcagaaccactcctggagaaagacttccttgcaggagtgactcaagaattaatcaagactcttgaagacaactctgaaaagtgggctgtgactcccgatgcaggggatggtgtggtcaagccctcgtctagagcagacccagcccagacctctgacacattagccttgaacaaccagatggtgacccagaacaggactccacacagcgtttgccaccagaaaccacaagcaaaatctggatcttgggacctccaaacttatagcgctgaccaacgcacaacaggaaactgggaatctcataggaagagccaggacatgaagaaaaggaaatatgatccatcttactgaggctcaggccacataattggactctgtcacaaagggactttggaaaactactttttggtcatgaaattgttcatcgctgctggagaatgaacgtcattgcaatttattcttgcttcattctgaaccttatcaagaggatctgactgagagcccactgcagttagagctgagcacttttgaaaagcttgtccatcactctagtagggagaggctctggacagatgaataccttttcttcggcttgtgaggcttcccactatttattactgaactattatgttaatgaagatggacattttaggaatcaccaatggctccttgccctcaagcaatataggccagacttggtcctaagcacctgcctcagcaattgtctacattcagttgttttgcataacgtctgccttctttcctttacggtccatgcctttaatgttgcccacattaagcactgtggatcacgacaggaaaaaggttggagcagtgcttttcactactttgtatcaatccaggctacaatcttcatttaatataaataatttatggatttatgacattacaatcctgcattgtttcaagactgacattttttcctaaggaaggaaataatcatctaagaccacgaaaaaaggctgttttttgtttttttttttttttttttttttgagacggggtctggctgtgttgccctgactggagttcagtggtgcaaacacagctctctccacaacctcttgggcccaagtgatactcccacctctgccttacaaaatacagggattactggtgtgagccactgtgtctggccagaaaaggcatttttgagaaagcaaatcgtataccttattaacaaaatagaatatatatatattgcttatctgaaatgcttgaaaccagaattgttttgcattttttgaatatttgtatacacataatgagaccttggggatgggacccaagtctgaacgtggaattcacctgtgtttcgtgtatatgcctcatacacataattttgtgcatgaaacagagtttttgtataagaagatacactgcagctgaagagggctgggtttttttttctcttagggtcgctgcataaactgttgtatgcctggtgctttgcgacttgtcacacgaggtcacgtgtggaattttccacttctggcatcacgtcagtgctcagaaattttctgatctcagagcatttcaattagggatgctcaaacgcaactgtttctacttccccatttcaggtgtgagatgtaacccaccttgaccataaattggcttttcatagtgctcagatgtttc

SEQ ID NO: 333 - DNA, 3814 bp, Homo sapiens
cctctcaccctttagcccagaactgctttgaatacaccaattgctgtggggcggctcgaggaagagaagacaccagtgcctcagaaactgctcggtcagacggtgatagcgagccacgcattcacagggccactgctgctcacagaagcagtgaggatgatgccaggatgatgtctgcctcgcgcctggctgggactctgatcccagccatggccttcctctcctgcgtgagaccagaaagctgggagccctgcgtggaggtggttcctaatattacttatcaatgcatggagctgaatttctacaaaatccccgacaacctccccttctcaaccaagaacctggacctgagctttaatcccctgaggcatttaggcagctatagcttcttcagtttcccagaactgcaggtgctggatttatccaggtgtgaaatccagacaattgaagatggggcatatcagagcctaagccacctctctaccttaatattgacaggaaaccccatccagagtttagccctgggagccttttctggactatcaagtttacagaagctggtggctgtggagacaaatctagcatctctagagaacttccccattggacatctcaaaactttgaaagaacttaatgtggctcacaatcttatccaatctttcaaattacctgagtatttttctaatctgaccaatctagagcacttggacctttccagcaacaagattcaaagtatttattgcacagacttgcgggttctacatcaaatgcccctactcaatctctctttagacctgtccctgaaccctatgaactttatccaaccaggtgcatttaaagaaattaggcttcataagctgactttaagaaataattttgatagtttaaatgtaatgaaaacttgtattcaaggtctggctggtttagaagtccatcgtttggttctgggagaatttagaaatgaaggaaacttggaaaagtttgacaaatctgctctagagggcctgtgcaatttgaccattgaagaattccgattagcatacttagactactacctcgatgatattattgacttatttaattgtttgacaaatgtttcttcattttccctggtgagtgtgactattgaaagggtaaaagacttttcttataatttcggatggcaacatttagaattagttaactgtaaatttggacagtttcccacattgaaactcaaatctctcaaaaggcttactttcacttccaacaaaggtgggaatgctttttcagaagttgatctaccaagccttgagtttctagatctcagtagaaatggcttgagtttcaaaggttgctgttctcaaagtgattttgggacaaccagcctaaagtatttagatctgagcttcaatggtgttattaccatgagttcaaacttcttgggcttagaacaactagaacatctggatttccagcattccaatttgaaacaaatgagtgagttttcagtattcctatcactcagaaacctcatttaccttgacatttctcatactcacaccagagttgctttcaatggcatcttcaatggcttgtccagtctcgaagtcttgaaaatggctggcaattctttccaggaaaacttccttccagatatcttcacagagctgagaaacttgaccttcctggacctctctcagtgtcaactggagcagttgtctccaacagcatttaactcactctccagtcttcaggtactaaatatgagccacaacaacttcttttcattggatacgtttccttataagtgtctgaactccctccaggttcttgattacagtctcaatcacataatgacttccaaaaaacaggaactacagcattttccaagtagtctagctttcttaaatcttactcagaatgactttgcttgtacttgtgaacaccagagtttcctgcaatggatcaaggaccagaggcagctcttggtggaagttgaacgaatggaatgtgcaacaccttcagataagcagggcatgcctgtgctgagtttgaatatcacctgtcagatgaataagaccatcattggtgtgtcggtcctcagtgtgcttgtagtatctgttgtagcagttctggtctataagttctattttcacctgatgcttcttgctggctgcataaagtatggtagaggtgaaaacatctatgatgcctttgttatctactcaagccaggatgaggactgggtaaggaatgagctagtaaagaatttagaagaaggggtgcctccatttcagctctgccttcactacagagactttattcccggtgtggccattgctgccaacatcatccatgaaggtttccataaaagccgaaaggtgattgttgtggtgtcccagcacttcatccagagccgctggtgtatctttgaatatgagattgctcagacctggcagtttctgagcagtcgtgctggtatcatcttcattgtcctgcagaaggtggagaagaccctgctcaggcagcaggtggagctgtaccgccttctcagcaggaacacttacctggagtgggaggacagtgtcctggggcggcacatcttctggagacgactcagaaaagccctgctggatggtaaatcatggaatccagaaggaacagtgggtacaggatgcaattggcaggaagcaacatctatctgaagaggaaaaataaaaacctcctgaggcatttcttgcccagctgggtccaacacttgttcagttaataagtattaaatgctgccacatgtcaggccttatgctaagggtgagtaattccatggtgcactagatatgcagggctgctaatctcaaggagcttccagtgcagagggaataaatgctagactaaaatacagagtcttccaggtgggcatttcaaccaactcagtcaaggaacccatgacaaagaaagtcatttcaactcttacctcatcaagttgaataaagacagagaaaacagaaagagacattgttcttttcctgagtcttttgaatggaaattgtattatgttatagccatcataaaaccattttggtagttttgactgaactgggtgttcactttttcctttttgattgaatacaatttaaattctacttgatgactgcagtcgtcaaggggctcctgatgcaagatgccccttccattttaagtctgtctccttacagaggttaaagtctagtggctaattcctaaggaaacctgattaacacatgctcacaaccatcctggtcattctcgagcatgttctattttttaactaatcacccctgatatatttttatttttatatatccagttttcatttttttacgtcttgcctataagctaatatcataaataaggttgtttaagacgtgcttcaaatatccatattaaccactatttttcaaggaagtatggaaaagtacactctgtcactttgtcactcgatgtcattccaaagttattgcctactaagtaatgactgtcatgaaagcagcattgaaataatttgtttaaagggggcactcttttaaacgggaagaaaatttccgcttcctggtcttatcatggacaatttgggctagaggcaggaaggaagtgggatgacctcaggaggtcaccttttcttgattccagaaacatatgggctgataaacccggggtgacctcatgaaatgagttgcagcagaagtttatttttttcagaacaagtgatgtttgatggacctctgaatctctttagggagacacagatggctgggatccctcccctgtacccttctcactgccaggagaacta

SEQ ID NO: 334 - DNA, 3935 bp, Homo sapiens
ggagagccgaaagcggagctcgaaactgactggaaacttcagtggcgcggagactcgccagtttcaaccccggaaacttttctttgcaggaggagaagagaaggggtgcaagcgcccccacttttgctctttttcctcccctcctcctcctctccaattcgcctccccccacttggagcgggcagctgtgaactggccaccccgcgccttcctaagtgctcgccgcggtagccggccgacgcgccagcttccccgggagccgcttgctccgcatccgggcagccgaggggagaggagcccgcgcctcgagtccccgagccgccgcggcttctcgcctttcccggccaccagccccctgccccgggcccgcgtatgaatctcctggaccccttcatgaagatgaccgacgagcaggagaagggcctgtccggcgcccccagccccaccatgtccgaggactccgcgggctcgccctgcccgtcgggctccggctcggacaccgagaacacgcggccccaggagaacacgttccccaagggcgagcccgatctgaagaaggagagcgaggaggacaagttccccgtgtgcatccgcgaggcggtcagccaggtgctcaaaggctacgactggacgctggtgcccatgccggtgcgcgtcaacggctccagcaagaacaagccgcacgtcaagcggcccatgaacgccttcatggtgtgggcgcaggcggcgcgcaggaagctcgcggaccagtacccgcacttgcacaacgccgagctcagcaagacgctgggcaagctctggagacttctgaacgagagcgagaagcggcccttcgtggaggaggcggagcggctgcgcgtgcagcacaagaaggaccacccggattacaagtaccagccgcggcggaggaagtcggtgaagaacgggcaggcggaggcagaggaggccacggagcagacgcacatctcccccaacgccatcttcaaggcgctgcaggccgactcgccacactcctcctccggcatgagcgaggtgcactcccccggcgagcactcggggcaatcccagggcccaccgaccccacccaccacccccaaaaccgacgtgcagccgggcaaggctgacctgaagcgagaggggcgccccttgccagaggggggcagacagccccctatcgacttccgcgacgtggacatcggcgagctgagcagcgacgtcatctccaacatcgagaccttcgatgtcaacgagtttgaccagtacctgccgcccaacggccacccgggggtgccggccacgcacggccaggtcacctacacgggcagctacggcatcagcagcaccgcggccaccccggcgagcgcgggccacgtgtggatgtccaagcagcaggcgccgccgccacccccgcagcagcccccacaggccccgccggccccgcaggcgcccccgcagccgcaggcggcgcccccacagcagccggcggcacccccgcagcagccacaggcgcacacgctgaccacgctgagcagcgagccgggccagtcccagcgaacgcacatcaagacggagcagctgagccccagccactacagcgagcagcagcagcactcgccccaacagatcgcctacagccccttcaacctcccacactacagcccctcctacccgcccatcacccgctcacagtacgactacaccgaccaccagaactccagctcctactacagccacgcggcaggccagggcaccggcctctactccaccttcacctacatgaaccccgctcagcgccccatgtacacccccatcgccgacacctctggggtcccttccatcccgcagacccacagcccccagcactgggaacaacccgtctacacacagctcactcgaccttgaggaggcctcccacgaagggcgaagatggccgagatgatcctaaaaataaccgaagaaagagaggaccaaccagaattccctttggacatttgtgtttttttgtttttttattttgttttgttttttcttcttcttcttcttccttaaagacatttaagctaaaggcaactcgtacccaaatttccaagacacaaacatgacctatccaagcgcattacccacttgtggccaatcagtggccaggccaaccttggctaaatggagcagcgaaatcaacgagaaactggactttttaaaccctcttcagagcaagcgtggaggatgatggagaatcgtgtgatcagtgtgctaaatctctctgcctgtttggactttgtaattatttttttagcagtaattaaagaaaaaagtcctctgtgaggaatattctctattttaaatatttttagtatgtactgtgtatgattcattaccattttgaggggatttatacatatttttagataaaattaaatgctcttatttttccaacagctaaactactcttagttgaacagtgtgccctagcttttcttgcaaccagagtatttttgtacagatttgctttctcttacaaaaagaaaaaaaaaatcctgttgtattaacatttaaaaacagaattgtgttatgtgatcagttttgggggttaactttgcttaattcctcaggctttgcgatttaaggaggagctgccttaaaaaaaaataaaggccttattttgcaattatgggagtaaacaatagtctagagaagcatttggtaagctttatcatatatatattttttaaagaagagaaaaacaccttgagccttaaaacggtgctgctgggaaacatttgcactcttttagtgcatttcctcctgcctttgcttgttcactgcagtcttaagaaagaggtaaaaggcaagcaaaggagatgaaatctgttctgggaatgtttcagcagccaataagtgcccgagcacactgcccccggttgcctgcctgggccccatgtggaaggcagatgcctgctcgctctgtcacctgtgcctctcagaacaccagcagttaaccttcaagacattccacttgctaaaattatttattttgtaaggagaggttttaattaaaacaaaaaaaaattcttttttttttttttttccaattttaccttctttaaaataggttgttggagctttcctcaaagggtatggtcatctgttgttaaattatgttcttaactgtaaccagtttttttttatttatctctttaatctttttttattattaaaagcaagtttctttgtattcctcaccctagatttgtataaatgcctttttgtccatcccttttttctttgttgtttttgttgaaaacaaactggaaacttgtttctttttttgtataaatgagagattgcaaatgtagtgtatcactgagtcatttgcagtgttttctgccacagacctttgggctgccttatattgtgtgtgtgtgtgggtgtgtgtgtgttttgacacaaaaacaatgcaagcatgtgtcatccatatttctctacatcttctcttggagtgagggaggctacctggaggggatcagcccactgacagaccttaatcttaattactgctgtggctagagagtttgaggattgctttttaaaaaagacagcaaacttttttttttatttaaaaaaagatatattaacagttttagaagtcagtagaataaaatcttaaagcactcataatatggcatccttcaatttctgtataaaagcagatctttttaaaaagatacttctgtaacttaagaaacctggcatttaaatcatattttgtctttaggtaaaagctttggtttgtgttcgtgttttgtttgtttcacttgtttccctcccagccccaaaccttttgttctctccgtgaaacttacctttccctttttctttctcttttttttttttgtatattattgtttacaataaatatacattgcattaaaaagaaa

SEQ ID NO: 335 - DNA, 1332 bp, Homo sapiens
gggtgctatagacgcacaaacgaccgcgagccacaaatcaagcacacatatcaaaaaacaaatgagctcttattttgtaaactcattttgcggtcgctatccaaatggcccggactaccagttgcataattatggagatcatagttccgtgagcgagcaattcagggactcggcgagcatgcactccggcaggtacggctacggctacaatggcatggatctcagcgtcggccgctcgggctccggccactttggctccggagagcgcgcccgcagctacgctgccagcgccagcgcggcgcccgccgagcccaggtacagccagccggccacgtccacgcactctcctcagcccgatccgctgccctgctccgccgtggccccctcgcccggcagcgacagccaccacggcgggaaaaactccctaagcaactccagcggcgcctcggccgacgccggcagcacccacatcagcagcagagagggggttggcacggcgtccggagccgaggaggacgcccctgccagcagcgagcaggcgagtgcgcagagcgagccgagcccggcgccgcccgcccaaccccagatctacccctggatgcgcaagctgcacataagtcatgacaacataggcggcccggaaggcaaaagggcccggacggcctacacgcgctaccagaccctggagctggagaaggagttccacttcaaccgttacctgacccgcagaaggaggattgaaatagcacatgctctttgcctctccgagagacaaattaaaatctggttccaaaaccggagaatgaagtggaaaaaagataataagctgaaaagcatgagcatggccgcggcaggaggggccttccgtccctgagtatctgagcgtttaaagtactgagcagtattagcggatcccgcgtagtgtcagtactaaggtgactttctgaaactcccttgtgttccttctgtgaagaagccctgttctcgttgccctaattcatcttttaatcatgagcctgtttattgccattatagcgcctgtataagtagatctgctttctgttcatctctttgtcctgaatggctttgtcttgaaaaaaaatagatgttttaacttatttatatgaagcaagctgtgttacttgaagtaactataacaaaaaaagaaaagagaaaaaaaaacacacaaaaagtcccccttcaatctcgtttagtgccaatgttgtgtgttgcactcaagttgtttaactgtgcatgtgcgtggaagtgttcctgtctcaatagctccaagctgttaaagatatttttattcaaactacctatattccttgt

SEQ ID NO: 336 - DNA, 2272 bp, Homo sapiens
gtcaggtgcgtgcccctgtccggcagccgaggagaccccgcgcagtgctgccaacgccccggtggagaagctgagacggagtctcactgtgttgcccaggctggagtgcagtggcgccatcttggctcactgcagtgcgcctctgccccccgagttcaagcgattctcctgcctcaggctcctgagtagctgggactacaggtcatcatcagatttgaaatatttaaagtggatacaaaactatttcagcaatgcagacaattaagtgtgttgttgtgggcgatggtgctgttggtaaaacatgtctcctgatatcctacacaacaaacaaatttccatcggaatatgtaccgactgtttttgacaactatgcagtcacagttatgattggtggagaaccatatactcttggactttttgatactgcagggcaagaggattatgacagattacgaccgctgagttatccacaaacagatgtatttctagtctgtttttcagtggtctctccatcttcatttgaaaacgtgaaagaaaagtgggtgcctgagataactcaccactgtccaaagactcctttcttgcttgttgggactcaaattgatctcagagatgacccctctactattgagaaacttgccaagaacaaacagaagcctatcactccagagactgctgaaaagctggcccgtgacctgaaggctgtcaagtatgtggagtgttctgcacttacacagaaaggcctaaagaatgtatttgacgaagcaatattggctgccctggagcctccagaaccgaagaagagccgcaggtgtgtgctgctatgaacatctctccagagccctttctgcacagctggtgtcggcatcatactaaaagcaatgtttaaatcaaactaaagattaaaaattaaaattcgtttttgcaataatgacaaatgccctgcacctacccacatgcactcgtgtgagacaaggcccataggtatggccccccccttccccctcccagtactagttaattttgagtaattgtattgtcagaaaagtgattagtactatttttttttgttgtttcaaaaaaaaaatttttgtgtgtgtgtttttttttttttttttttttttttttgttgtttaaaagcaaggcatgcttgtggatgactctgtaacagactaattggaattgttgaagctgctccctggttccactctggagagtaatctgggacatcttagtgttttgttttgtttttttccctcctcttttttttgggggggagtgtgtgtggggtttgttttttagtcttgtttttttaattcattaaccagtggttagcccttaaggggaggaggacggattgattccacattccacttcctagatctagtttagaaaacatgttccccatctggtgctcttaggaaggagtatagtaaatgcctcatttaataacatactcctttttgaaagttgccttttctctccacccttgagtagatccagtatttgatgaaactcatgaaagtgggtggagcccatcttgcccctcctcttttctaggacgcactatatgtgactgtgactttcaaggacatttgtttgccatttgctgatttttttgggaagttaatttctaacttctttcactgataaatgaagaaaagtattgcacctttgaaatgcaccaaatgaattgagtttgtaattaaaaaaatttttttccctttcagtcattgtcttatatgcttagcatagatttgcagctcagtagtatatggtgttcctagaatgcagctgaagacctgttatgtagaggaaatacgaggggtggtgctagaagacagacatctgtggaatgattcacatcctctcaagttaggaggatggaggcctgcttcattaagaagctgggggtagggtgggggtggggagaacacttaacaacatggggaccagtcaggggaatccccttatttctgttttgcatatgaggaaccctagagcagccaggtgaggctctctagtttaataaaaatcatggaaagactcttaatgcagactcttcttaagtgttaatagggattttttcagcttattttggttgcagtttccaatttttaaaaatgttgaggtaatctttcccaccttcccaaacctaattcttgtagatgcattagtgttgaaccaatgctttctcatgtctcaattctttgtatatgcattcttttcagatgtattaaacaaacaaaaacccttcaaaaaaaaaaaaaaa

SEQ ID NO: 337 - DNA, 7343 bp, Homo sapiens
agtctgcgggcctccggggctgcggcgaggccggagcgtcgcggcggagaggacgagaccgggacaagaccagggcaggagggagccggccagccgcgagaaccccgcacgcccggcaagatgctgtccttgcggctgcagacgggccccgagaaggccgagctccaggagctcaacgcccggctctatgactacgtgtgtcgggtgcgggagctggagcgcgaaaacctactcctggaggaggagctgcgcggccggcgcgggcgagagggcctgtgggccgaggggcaggcccgctgcgccgaggaggcgcgcagcttgcggcagcagctggacgagctgagctgggccactgcgctggcggagggcgagcgggacgctctgcggcgcgagctgcgggagctgcagcgcctggatgcggaggagcgcgccgcccgcggccgcctggacgccgagctgggtgcgcagcagcgcgagctgcaggaggcgctgggcgcgcgcgccgccctcgaggcgctgctgggccgactgcaggccgagcgccgaggcctcgacgcggcccacgaacgcgacgtgagggagctgcgcgcgcgcgccgccagccttaccatgcatttccgcgcccgcgccaccggccccgccgcgccgccgccacgcctgcgggaggtgcacgacagctacgcactgctggtggccgagtcgtggcgggagacggtgcagctgtacgaggacgaggtgcgcgagctggaggaggcgctgcggcgcggccaggagagcagactccaggcggaggaagagacgcggctgtgcgcgcaggaggcagaggcgctgcggcgcgaggcgctcgggttggagcagctgcgcgcgcggctggaggacgcgctgctgcggatgcgcgaggagtacgggatacaggccgaggagcggcagagagtgattgactgcctggaggatgagaaggcaaccctcaccttggccatggctgactggctgcgggactatcaggacctcctgcaggtgaagaccggcctcagtttggaggtggcgacctaccgggccttattggaaggagaaagtaatccagagatagtgatctgggctgagcacgttgaaaacatgccgtcagaattcagaaacaaatcctatcactataccgactcactactacagagggaaaatgaaaggaatctattttcaaggcagaaagcacctttggcaagtttcaatcacagctcggcactgtattctaacctgtcagggcaccgtggatctcagacgggcacatctattggaggtgatgccagaagaggcttcttgggctcgggatattcttcctcggccactacccagcaggaaaactcatacggaaaagccgtcagcagtcaaaccaacgtcagaactttctctccaacctatggccttttaagaaatactgaggctcaagtgaaaacattccctgacagaccaaaagccggagatacaagggaggtccccgtttacataggtgaagattccacaattgcccgcgagtcgtaccgggatcgccgagacaaggtggcagcaggtgcttcggaaagcacacggtcaaatgagaggaccgtcattctgggaaagaaaacagaagtgaaagccacgagggagcaagaaagaaacagaccagaaaccatccgaacaaagccagaagagaaaatgttcgattctaaagagaaggcttccgaggagagaaacctaagatgggaagaattgacaaagttagataaggaagcgagacagagagaaagccagcagatgaaggagaaggctaaggagaaggactcactgaaggagaagagtgtgcgagagagagaggtgccgattagtctagaagtatcccaggacagaagagcagaggtgtccccgaaaggtttgcagacgcctgtgaaggatgctggtggtgggaccggtagagaggcagaagcaagagagctacggttcaggttgggcaccagtgatgccactggttctctgcaaggcgattccatgacagaaaccgtagcagaaaacatcgttaccagtatcctgaagcagttcactcagtctccagagacagaagcatctgctgattcttttccagacacaaaagtcacttacgtggacaggaaagagcttcctggggaaaggaaaacaaagactgaaatacttgtggagtctaaactgactgaggatgttgatgtttccgatgaagctggcctggactaccttttaagcaaggatattaaggaagtggggctgaaaggcaagtcagccgagcagatgataggagacatcatcaacctcggcctgaaagggagggaggggagagcaaaggtcgtcaacgtggagatcgtggaggagcccgtgagttatgtcagcggggagaagccggaggagttttccgtcccattcaaagtggaggaggtcgaagatgtgtcgccaggcccctgggggttggttaaggaggaggaaggttatggagaaagcgatgtcacattctcagttaatcagcatcgaaggaccaagcagcctcaggagaacacgactcacgtggaagaagtgacagaggcaggtgattcagagggcgagcagagttattttgtgtccactccagatgaacaccccggggggcacgacagagatgacggctcggtgtacgggcagatccacatcgaggaggaatccaccatcaggtactcttggcaggatgaaatcgtgcaggggactcgaaggaggacacagaaggacggtgcagtgggcgagaaggttgtgaagcccttggatgtcccagcgccctctctggagggggacctgggttccactcactggaaagaacaagctagaagcggtgaatttcatgccgaacccacagtcattgaaaaagaaattaaaataccccacgaattccacacctccatgaagggcatctcctccaaggagccccggcagcagctggtggaagtcatcgggcagctggaggaaacccttcccgagcgcatgagggaggagctgtccgccctcaccagagaggggcagggtgggccggggagcgtttccgtggatgtcaagaaggtccagggtgctggtggcagttccgtgaccctggttgctgaagtcaacgtctcacaaactgtggatgccgatcggttagacctggaggaggtgagcaaagatgaggccagtgagatggagaaggctgtggagtcggtggttcgggagagcctgagcaggcaacgcagcccagcgcctggcagcccagatgaggaaggtggagcggaggccccggctgctggcattcgctttaggcgttgggccacccgggagctgtacatcccttcaggcgagagcgaggttgctggtggggcctctcacagctcgggacagcgcactccccagggcccagtgtcggccactgtggaggtcagcagccccacaggctttgcccagtcacaggtgctggaggatgtgagccaggctgcaaggcacataaaactcggcccctctgaagtctggaggactgagcgaatgtcatatgaaggacccactgcagaagtggtgggggtaagtgcgggaggtgacctaagtcaggcagcgagcccgaccggagccagccggtctgtgaggcatgtcacgctgggtcccggtcaaagtccactgtccagagaagtcatcttcctaggccctgcccctgcctgtccagaggcatggggctcgccagaacctggcccagcagagtcttctgcagatatggacggatcagggaggcacagcacatttggctgcagacaatttcatgctgaaaaggagattatttttcagggccccatttctgctgcagggaaggttggtgattattttgcaacagaagagtcagtgggtacccagacttctgtcaggcaactccagttaggccctaaagaagggttcagtgggcaaatccagttcacagctccactttcagacaaggtggagttgggtgtcacaggagattctgtacacatggaagggttgccagggagcagcacatccatcaggcacatcagcattgggcctcagaggcatcagaccacccagcagatagtttaccatgggctggttccccaactgggggaatctggtgactcagagagcactgtgcacggagagggctcagcagatgtgcaccaggccactcacagtcatacctcgggtagacaaaccgttatgactgaaaagagcaccttccaaagtgtcgtttctgaatctccccaggaggatagtgcagaggacacatcaggggcagaaatgacatcgggtgttagcagatcctttaggcacattcgactaggtcctacagaaacggaaacctctgaacacattgccatccgtggacccgtgtccagaacatttgtgcttgctggttcagcggactcccctgagctaggcaagttagcagacagcagcagaacgctaaggcacattgcaccagggcccaaagaaacttcgtttacctttcagatggatgtgagtaacgtagaggcgatccgcagccggacacaggaagcgggagctctcggtgtgtctgaccgtggttcctggagagacgcggacagtaggaatgaccaggcagttggtgtgagctttaaggcctctgctggggaaggagaccaggcccacagagaacagggcaaggagcaggccatgtttgataagaaggtgcagctccagagaatggtagaccaaaggtcggtgatttcagatgaaaagaaagttgccctcctctatctagacaatgaggaggaggagaatgatgggcattggttttaataagcagaaacattttgttttaatggcagcctgttggcgacgtgccaacatccaaaggccttaacttattttaagaggccgagggagtctatgaaaatctccccttttttacttttttaaagagtactcccggcatggtcaatttcctttatagttaatccgtaaaggtttccagttaattcatgccttaaaaggcactgcaattttatttttgagttgggacttttacaaaacacttttttccctggagtcttctctccacttctggagatgaatttctatgttttgcacctggtcacagacatggcttgcatctgtttgaaactacaattaattatagatgtcaaaacattaaccagattaaagtaatatatttaagagtaaattttgcttgcatgtgctaatatgaaataacagactaacattttaggggaaaaataaatacaatttagactctaaaaagtcttttcaaaaagaaatgggaaataggcagactgtttatgttaaaaaaattcttgctaaatgatttcatctttaggaaaaaattacttgccatatagagctaaattcatcttaagacttgaatgaattgctttctatgtacagaactttaaacaatatagtatttatggcgaggacagctgtagtctgttgtgatatttcacattctatttgcacaggttccctggcactggtagggtagatgattattgggaatcgcttacagtaccatttcattttttggcactaggtcattaagtagcacacagtctgaatgcccttttctggagtggccagttcctatcagactgtgcagacttgcgcttctctgcaccttatcccttagcacccaaacatttaatttcactggtgggaggtagaccttgaagacaatgaagagaatgccgatactcagactgcagctggaccggcaagctggctgtgtacaggaaaattggaagcacacagtggactgtgcctcttaaagatgcctttcccaaccctccattcatgggatgcaggtctttctgagctcaagggtgaaagatgaatacaataacaaccatgaacccacctcacggaagctttttttgcactttgaacagaagtcattgcagttggggtgttttgtccagggaaacagtttattaaatagaaggatgttttggggaaggaactggatatctctcctgcagcccagcaccgagatacccaggacgggcctggggggcgagaaaggcccccatgctcatgggccgcggagtgtggacctgtagataggcaccaccgagtttaagatactgggatgagcatgcttcattggattcattttattttacacgtcagtattgttttaaagtttctgtctgtaaagtgtagcatcatatataaaaagagtttcgctagcagcgcattttttttagttcaggctagcttctttcacataatgctgtctcagctgtatttccagtaacacagcatcatcacactgactgtggcgcactggggaataacagtctgagctagcaccaccctcagccaggctacaacgacagcactggagggtcttccctctcagattcacctggaggccctcagacccccagggtgcacgtctccccaggtcctgggagtggctaccgcaggtagtttctggagagcacgttttcttcattgataagtggaggagaaatgcagcacagctttcaagatactattttaaaaacaccatgaatcagatagggaaagaaagttgattggaatggcaagtttaaacctttgttgtccatctgccaaatgaactagtgattgtcagactggtatggaggtgactgctttgtaaggttttgtcgtttctaatacagacagagatgtgctgattttgttttagctgtaacaggtaatggtttttggatagatgattgactggtgagaatttggtcaaggtgacagcctcctgtctgatgacaggacagactggtggtgaggagtctaagtgggctcagtttgatgtcagtgtctgggctcatgacttgtaaatggaagctgatgtgaacaggtaattaatattatgacccacttctatttactttgggaaatatcttggatcttaattatcatctgcaagtttcaagaagtattctgccaaaagtatttacaagtatggactcatgagctattgttggttgctaaatgtgaatcacgcgggagtgagtgtgcccttcacactgtgacattgtgacattgtgacaagctccatgtcctttaaaatcagtcactctgcacacaagagaaatcaacttcgtggttggatggggccggaacacaaccagtctttttgtatttattgttactgagacaaaacagtactcactgagtgtttttcagtttcctactggtggttttgatattgtttgtttaagatgtatatttagaatgacatcatctaagaagctgattttgctaaactcctgttccctacaatgggaaatgtcacaagaatgtgcaaaaataaaaatctgagg

SEQ ID NO: 338 - DNA, 6996 bp, Homo sapiens
atggaccaaggcccttggcggtgcgttgcgcacccccggggcgccgcgactgaagtagcaatggacgcgctggagtcgttgttggacgaagtcgctctggaggggctcgatggcctgtgtctgccagcgctgtggagccggctggagacgcgagtgccgcccttcccgctgcctttggaaccctgcacgcaggagtttctctggcgggccctcgccacgcacccgggcatcagcttctatgaggagcctcgggagcgacccgacctacagctccaggaccggtatgaagaaattgatttggaaactggaattttggagtctaggagggacccggtggctttggaggatgtctaccccattcatatgatcttagagaataaggatggcatccagggctcatgccgctactttaaggagaggaaaaacattaccaatgacatcagaaccaagtccttgcagcctcgctgtacaatggtggaaccctttgacaggtgggggaagaaactgatcatcggttccctcccagcccatgcggtacaggcccttgatagcccaggagggggatcccgacctgaagctgcccgacttctcctactgcatcctggaacggctaggccggtccaggtgcaaggggagctccagcgagaccttcacaccactgctttcaaggttgatgctgggaagctgcactatcacagaaaaattttgaacaaaaacgggctgattacaatgcagtcccatgtgatccgattacccactggagcccagcaacactcaatcctcctcctactgaaccggtttcatgtggacaggaggagcaaatacgacatcctcatggagaagctttcggtcatgctgagcacacggactaaccacatagagacgctgggaaagctgagggaagagctggggctgtgcgaaaggacgtttaagcgtctgtaccagtatatgctgaacgccgggctagccaaggtggtgtctcttcgcttgcaagagatccaccctgaatgtggaccttgtaagacaaagaaagggaccgacgtcatggttcggtgcctcaagctgctgaaggaatttaaacggaatgaccatgatgatgacgaggacgaggaggtcatctccaagacagtgcctccagtggacattgtgttcgagcgggatatgctcacacagacctacgacctcattgagcgcagaggcacgaaaggaatttcccaagctgaaatccgagtggctatgaatgtgggaaaactagaagcaagaatgctgtgccgacttcttcaaagattcaaagttgtcaagggattcatggaagacgaaggtcggcagcgaaccaccaagtacatttcctgcgtgtttgcagaggagagcgacctaagccggcagtaccaaagagagaaggcccgcagcgagctcttgaccaccgtgagcctggcgtctatgcaggaggagtcgcttctgcctgaaggcgaggacaccttcctctctgagtcggacagtgaggaggagaggagcagcagcaagcggagaggcagagggtcccagaaagacacaagagcctctgcaaacctccggcccaagacccagcctcatcactccaccccaaccaagggtgggtggaaagttgtaaacctacacccattgaaaaagcagccgccctccttcccaggagctgctgaagagagagcctgccagagccttgccagcagggacagcctcttagataccagcagcgtctcagaacccaacgtgtcctttgtctcccactgtgcggacagcaacagtggtgacatagctgtgatcgaggaggtccggatggaaaacccaaaggagagtagcagttccctgaagactgggaggcacagctcaggccaagacaaaccacacgaaacttaccgactgctgaaacgcaggaatctgatcatagaagctgtcaccaatcttcgcttaatcgagagtttattcacgattcagaagatgatcatggatcaggagaagcaggaaggcgtgtccaccaagtgctgcaagaagtccattgtccgcttggtgcggaacctgtctgaggaaggtctcttgcgattgtatcggaccactgtcattcaagatggcatcaagaagaaggtggatctggtggtgcacccgtccatggaccagaacgaccctctagtgagaagtgccatcgagcaggtccgcttccggatctccaattcaagcacagccaacagggttaaaacttcccagcctccagtgccccaaggggaggcagaagaagacagtcaaggaaaagagggcccaagtggatcaggggactctcagctgagtgcttcctctagatcagaaagtggacggatgaaaaaaagtgataataaaatgggcataaccccgcttagaaattatcaccccattgtagttcccggactggggcgttctctaggatttctgcccaaaatgcctcgcctgcgggtggtccacatgtttctgtggtacctcatctacgggcaccctgccagcaacaccgtggagaagccaagcttcatcagtgaacggagaacgataaagcaggagtcaggcagggcaggcgtccggccgtcctcctctggaagtgcctgggaggcctgctctgaagccccatctaaaggcagccaagatggtgtcacctgggaggctgaagtggagcttgccacggagacagtgtatgtcgacgatgcctcgtggatgcgctacatccccccaatcccagtccacagggacttcggctttggctgggctctcgtcagcgacatcctcctctgccttcccctctccatcttcatccagattgtgcaagtcagctacaaggtggacaacctggaggaatttctgaacgacccgctgaagaagcacacgctgatccgctttctccccaggcccattcggcagcagcttctgtacaagaggcgttacattttttcggtggtggagaaccttcagaggctgtgctacatgggggtgctacagtttggtcccacggaaaagtttcaggataaagatcaggtctttatcttcttgaagaagaatgcagtcattgttgacactaccatctgcgacccacattacaacctgggccgcaggaggcggcccttcgagaggcgcctctatgtcctgaactcaatgcaggatgtggaaaactactggtttgacctgcagtgcgtctgcctcaacaccccactaggcgtggtgcgctgcccgcgcgtcaggaagaacagcagcacagaccagggcagcgacgaggagggcagcctgcagaaggagcaggagagcgccatggacaagcacaacctggagcgcaagtgcgccatgctggagtacaccactggaagccgtgaggtggtggatgaaggcttgatccctggagatgggctgggtgccgcagggctcgattccagcttctacggacacctcaagcgcaactggatctggaccagctacatcatcaaccaggccaaaaaggagaacactgccgcagagaatggactcacagtgaggctccagacatttctgtccaagcgcccaatgcccctcagtgccagaggcaacagcaggttgaatatttggggggaagcaagagtaggctccgagctctgtgctggctgggaagagcagtttgaggtggaccgagagccctcgctggaccgaaaccggagagtgaggggtgggaaaagccagaagcggaagcggctgaagaaggaccctgggaagaagatcaagagaaagaagaaaggagagttcccaggagaaaaaagcaaaaggctgcgctaccatgatgaagccgaccagagtgccctgcatcggatgacgcggcttcgtgtcacctggtctatgcaggaggatgggctgcttgtgctgtgccgcattgccagcaatgtcctcaacaccaaggtgaagggtccatttgtcacctggcaggtggtacgggacattttgcatgccacgtttgaagagtctttggataaaacatctcattcccttggacgaagagctcgctacatagtcaaaaacccacaggcctatctcaactataaagtgtgcctggccgaggtgtaccaggataaagcacttgttggagatttcatgaatcgaagaggtgactatgatgacccaaaggtttgtgccaacgagtttaaagaatttgtggagaagcttaaagaaaagttcagttcagccctaaggaattctaaccttgaaatcccagacacactccaggagctgttcgccaggtaccgagttttggcaattggggatgaaaaagatcaaaccaggaaagaggatgaacttaacagcgtggatgacatccactttctggtgcttcagaacctgatccagagcacgctggccctctcagacagtcagatgaagtcctaccagtcattccagactttccgcctctatcgggagtacaaggaccacgttcttgtgaaggccttcatggagtgccagaagaggagcttggtcaaccggcgccgggtcaaccacacgctgggccccaagaagaaccgggccctccccttcgtgccaatgtcctaccagctatcccagacctactacaggatttttacgtggcgatttccaagcaccatctgcacggagtcattccagtttttggacagaatgcgggctgccggcaagttggaccagcctgatcgtttctctttcaaagaccaggataataacgagcccacaaacgacatggtggccttttcactggacggccctggaggaaattgtgtggccgtcctgaccctcttctctctgggcctcatttctgtggatgtcaggatcccggagcagatcatcgtggtagacagctcaatggtggagaatgaggtcatcaaaagcttggggaaggacggcagcctggaggatgacgaggatgaagaggatgacttggacgaaggtgtagggggcaagcgccggagcatggaggtgaaacctgcgcaagcctcccacaccaactacctgctgatgaggggctactactcccccggcatcgtcagcacccgcaacctcaaccccaacgacagcattgtggtcaactcctgccagatgaagttccagctccgctgcacccctgtgcccgcccggctcaggcccgctgccgctcctctggaagagctaacaatgggaacctcctgcctccctgatacgttcaccaagctgataaacccccaggaaaacacctgcagcttggaggagtttgtcctccagctggagctgtctgggtatagtcccgaagacctgactgctgccttggagatcttggaagccattatagccacgggttgttttgggattgacaaggaggagctgcgcagacggttctcggccttggagaaggcaggtggtgggcgcaccaggacattcgcagattgcatccaggccctcctggagcagcatcaggtgctggaggtcggtggcaacactgcgcgcctggtagccatgggctctgcctggccttggctcctgcactccgtgcggctgaaagacagagaagacgccgacatccagagagaagacccccaggccagacccctggaggggtcttccagtgaggacagcccccccgaggggcaggcacctccttctcacagcccccggggcaccaagaggcgcgccagctgggccagtgagaatggggagaccgacgccgagggcacccagatgacccctgccaagaggccagcgctccaggactcaaatttggcccccagccttgggcccggagctgaagatggggcagaagcccaggccccatctccacccccagctcttgaagacaccgctgcagcgggagcagcacaggaagaccaagagggtgtcggtgagttcagttccccaggccaagagcagctgagcggccaggcgcagcctccagagggctctgaagaccccagagggttcacagagagtttcggagctgccaacatctcccaggcagcacgggaaagggactgtgagagtgtctgcttcatcggccggccgtggcgtgtcgtggatggccacctgaaccttcctgtatgcaagggtatgatggaggccatgctgtaccacatcatgaccaggcctggcatccccgagagctccctgctgcgccactaccagggggtcctgcagcccgtcgccgtgctggagttgctccagggcctggagtccctcggctgcatccggaagcgctggctgagaaagccaaggcctgtctcgctcttctctacacccgtggtggaagaggtggaagtgccctccagcctggacgagagccccatggctttctatgagcccaccttggactgtaccctccggctgggccgtgtgttcccccacgaggtcaactggaacaagtggatccacctctaggacccctgtgggcgtcccctccctcccagccaccgcctgccacaccactcctgcctggtgctcggcagaccccactgtgccctggccttgggtctgccgagcctcctgcagcaggggacgggtgctttggccagagtcacagactgacacgtttcccactgtactggaactctggaaagaggggctccccgacctgcccatcccccaggctcttctgggccttccccttgggaactggcctcatcacactgggagttggtgcttcttgtctctgggtctccagagtttgccccgcctgtgcacacctcacattccagactctagccatctcggcaggatctcctggctccttgagtgcccaggtgccaccaagaggaagggccttgtgggatacaccttgcagaatagggatcggtgtgccccgctgcgaggggccccccatgggggctgtggcccctccgcaggcaggacatcccaacccctggctgggactgaaccacccagagcggagcggctcccttttcagccttgtgagtcacctggcaggccccagctgggctggctgtccgtgtccctcagcctggctggtgattccttgcaggaggg

SEQ ID NO: 339 - DNA, 2038 bp, Homo sapiens
cgaagggctcgaagatggccggttggcagagctacgtggataacctgatgtgcgatggctgctgccaggaggccgccattgtcggctactgcgacgccaaatacgtctgggcagccacggccgggggcgtctttcagagcattacgccaatagaaatagatatgattgtaggaaaagaccgggaaggtttctttaccaacggtttgactcttggcgcgaagaaatgctcagtgatcagagatagtctatacgtcgatggtgactgcacaatggacatccggacaaagagtcaaggtggggagccaacatacaatgtggctgtcggcagagctggtagagtcttggtctttgtaatgggaaaagaaggggtccatggaggcggattgaataagaaggcatactcaatggcaaaatacttgagagactctgggttctagctgctaggcagactgttaagtattaggggaaaattgctcttaaactttcctagctataagcttaagtcttaattctggaaattttattagcaatgcagggtgatggggtatgaacctgtgtctcctttgtatccctctgttggtggggaaaggtgtctttctttctgccctccccccccaaaataattctgttcacttttgttttgtttccttgtgtactccagcattggttatagtcatgggaaaggaaggtgtccacggaggcacacttaacaagaaagcatatgaactcgctttatacctgaggaggtctgatgtgtaagcagcctctccccatctacctagcaactgtcttcatcaacaaccctaattatggtcacaatgctaccaaactgtagatggtagctaatttttctttacctattttctaatgtcatgattcctgtttgcccaatggatcatttgtatgttaaccactgtatgtaaccaacccttatctggcaacataattgcagcacaataatgatttgcatgataccttgaaattggggggagggggcatgccaagttgggcatcactttgtcttagcaattaatgggatattgattactaaaataagttaatattaagcaaggtgccggttgtacaatctctgatcagtgtcttttcagcactttgagcatttacttggctcatttagtcttccttttgtagcgcatggttgggaggaaaaagtgcatgcatcattccttcactcttctctttttcccgcccccccctcccttcgcacataggcatttggtttgcttccatctttttttatgcagtgcctgtttttttttaaccaattaaaatcccttttgttgatgagctattgagagctgcagtagtttgcttttagtattgttgttgcacttgagcagagacaaacctttattcatagtgtctacaggacatatgaagagtgcaatggcaaaacaagagcaaaaagcacttcctcccatgaccttacagtaaccatactgattgaatccccagggacattccatcattgcaatagctcagatttttcttcctttttctttgcacaccagctctactctttagtaaaattgtaaaaggctgccattatggacattaggtatcccaacataaccatctggagtgtgtccagtttgttcttcataggaccaatttttatttgcagcttgagtttttatatgaagttgcattattgtggacttggctgtcttgtgatgaatttttttcatatgtattctgtgccatactattgttaaaatgaactgttgctattgtgagatggattttaactgacctattaagggtttctttcgaatggcactactttagggacattctagtatttgcttctattgtttgggccttgtggataatgtacagatttaaaaacaaatcttgttgctgatttgtccatttctttccctgcactttgttacatctgggatacagtctaactcatctgatttaatatgcatttaaaaaaatgccataactattaaacaccttgtttacagacagatgaaataaatttattccaaccaaaaaaaaaaaaaaaaaa

SEQ ID NO: 340 - DNA, 3992 bp, Homo sapiens
ggcttcaggaagggcagacagagtgtccaaaagcgtgagagcacgaagtgaggagaaggtggagaagagagaagaggaagaggaagaggaagagaggaagcggagggaactgcggccaggctaaaaggggaagaagaggatcagcccaaggaggaggaagaggaaaacaagacaaacagccagtgcagaggagaggaacgtgtgtccagtgtcccgatccctgcggagctagtagctgagagctctgtgccctgggcaccttgcagccctgcacctgcctgccacttccccaccgaggccatgggcccaggagttctgctgctcctgctggtggccacagcttggcatggtcagggaatcccagtgatagagcccagtgtccccgagctggtcgtgaagccaggagcaacggtgaccttgcgatgtgtgggcaatggcagcgtggaatgggatggccccgcatcacctcactggaccctgtactctgatggctccagcagcatcctcagcaccaacaacgctaccttccaaaacacggggacctatcgctgcactgagcctggagaccccctgggaggcagcgccgccatccacctctatgtcaaagaccctgcccggccctggaacgtgctagcacaggaggtggtcgtgttcgaggaccaggacgcactactgccctgtctgctcacagacccggtgctggaagcaggcgtctcgctggtgcgtgtgcgtggccggcccctcatgcgccacaccaactactccttctcgccctggcatggcttcaccatccacagggccaagttcattcagagccaggactatcaatgcagtgccctgatgggtggcaggaaggtgatgtccatcagcatccggctgaaagtgcagaaagtcatcccagggcccccagccttgacactggtgcctgcagagctggtgcggattcgaggggaggctgcccagatcgtgtgctcagccagcagcgttgatgttaactttgatgtcttcctccaacacaacaacactaagctcgcaatccctcaacaatctgactttcataataaccgttaccaaaaagtcctgaccctcaacctcgatcaagtagatttccaacatgccggcaactactcctgcgtggccagcaacgtgcagggcaagcactccacctccatgttcttccgggtggtagagagtgcctacttgaacttgagctctgagcagaacctcatccaggaggtgaccgtgggggaggggctcaacctcaaagtcatggtggaggcctacccaggcctgcaaggttttaactggacctacctgggacccttttctgaccaccagcctgagcccaagcttgctaatgctaccaccaaggacacatacaggcacaccttcaccctctctctgccccgcctgaagccctctgaggctggccgctactccttcctggccagaaacccaggaggctggagagctctgacgtttgagctcacccttcgataccccccagaggtaagcgtcatatggacattcatcaacggctctggcacccttttgtgtgctgcctctgggtacccccagcccaacgtgacatggctgcagtgcagtggccacactgataggtgtgatgaggcccaagtgctgcaggtctgggatgacccataccctgaggtcctgagccaggagcccttccacaaggtgacggtgcagagcctgctgactgttgagaccttagagcacaaccaaacctacgagtgcagggcccacaacagcgtggggagtggctcctgggccttcatacccatctctgcaggagcccacacgcatcccccggatgagttcctcttcacaccagtggtggtcgcctgcatgtccatcatggccttgctgctgctgctgctcctgctgctattgtacaagtataagcagaagcccaagtaccaggtccgctggaagatcatcgagagctatgagggcaacagttatactttcatcgaccccacgcagctgccttacaacgagaagtgggagttcccccggaacaacctgcagtttggtaagaccctcggagctggagcctttgggaaggtggtggaggccacggcctttggtctgggcaaggaggatgctgtcctgaaggtggctgtgaagatgctgaagtccacggcccatgctgatgagaaggaggccctcatgtccgagctgaagatcatgagccacctgggccagcacgagaacatcgtcaaccttctgggagcctgtacccatggaggccctgtactggtcatcacggagtactgttgctatggcgacctgctcaactttctgcgaaggaaggctgaggccatgctgggacccagcctgagccccggccaggaccccgagggaggcgtcgactataagaacatccacctcgagaagaaatatgtccgcagggacagtggcttctccagccagggtgtggacacctatgtggagatgaggcctgtctccacttcttcaaatgactccttctctgagcaagacctggacaaggaggatggacggcccctggagctccgggacctgcttcacttctccagccaagtagcccagggcatggccttcctcgcttccaagaattgcatccaccgggacgtggcagcgcgtaacgtgctgttgaccaatggtcatgtggccaagattggggacttcgggctggctagggacatcatgaatgactccaactacattgtcaagggcaatgcccgcctgcctgtgaagtggatggccccagagagcatctttgactgtgtctacacggttcagagcgacgtctggtcctatggcatcctcctctgggagatcttctcacttgggctgaatccctaccctggcatcctggtgaacagcaagttctataaactggtgaaggatggataccaaatggcccagcctgcatttgccccaaagaatatatacagcatcatgcaggcctgctgggccttggagcccacccacagacccaccttccagcagatctgctccttccttcaggagcaggcccaagaggacaggagagagcgggactataccaatctgccgagcagcagcagaagcggtggcagcggcagcagcagcagtgagctggaggaggagagctctagtgagcacctgacctgctgcgagcaaggggatatcgcccagcccttgctgcagcccaacaactatcagttctgctgaggagttgacgacagggagtaccactctcccctcctccaaacttcaactcctccatggatggggcgacacggggagaacatacaaactctgccttcggtcatttcactcaacagctcggcccagctctgaaacttgggaaggtgagggattcaggggaggtcagaggatcccacttcctgagcatgggccatcactgccagtcaggggctgggggctgagccctcaccccccgcctcccctactgttctcatggtgttggcctcgtgtttgctatgccaactagtagaaccttctttcctaatccccttatcttcatggaaatggactgactttatgcctatgaagtccccaggagctacactgatactgagaaaaccaggctctttggggctagacagactggcagagagtgagatctccctctctgagaggagcagcagatgctcacagaccacactcagctcaggccccttggagcaggatggctcctctaagaatctcacaggacctcttagtctctgccctatacgccgccttcactccacagcctcacccctcccacccccatactggtactgctgtaatgagccaagtggcagctaaaagttgggggtgttctgcccagtcccgtcattctgggctagaaggcaggggaccttggcattggctggccacaccaagcaggaagcacaaactcccccaagctgactcatcctaactaacagtcacgccgtgggatgtctctgtccacattaaactaacagcattaatgc

SEQ ID NO: 341 - DNA, 3158 bp, Homo sapiens
aaaccggaacggggcccaacttctggggcctggagaagggaaacgaagtcccccccggtttcccgaggttgcctttcctcgggcatccttggtttcggcgggacttcgcagggcggatataaagaacggcgcctttgggaagaggcggagaccggctttaaagaaagaagtcttggtcctgcggcttgggcgaggcaagggcgaggcaagggcgctttctgccgacgctccccgtggccctacgatcccccgcgcgtccgccgctgttctaaggagagaagtgggggccccccaggctcgcgcgtggagcgaagcagcatgggcagtcggtgcgcgctggccctggcggtgctctcggccttgctgtgtcaggtctggagctctggggtgttcgaactgaagctgcaggagttcgtcaacaagaaggggctgctggggaaccgcaactgctgccgcgggggcgcggggccaccgccgtgcgcctgccggaccttcttccgcgtgtgcctcaagcactaccaggccagcgtgtcccccgagccgccctgcacctacggcagcgccgtcacccccgtgctgggcgtcgactccttcagtctgcccgacggcgggggcgccgactccgcgttcagcaaccccatccgcttccccttcggcttcacctggccgggcaccttctctctgattattgaagctctccacacagattctcctgatgacctcgcaacagaaaacccagaaagactcatcagccgcctggccacccagaggcacctgacggtgggcgaggagtggtcccaggacctgcacagcagcggccgcacggacctcaagtactcctaccgcttcgtgtgtgacgaacactactacggagagggctgctccgttttctgccgtccccgggacgatgccttcggccacttcacctgtggggagcgtggggagaaagtgtgcaaccctggctggaaagggccctactgcacagagccgatctgcctgcctggatgtgatgagcagcatggattttgtgacaaaccaggggaatgcaagtgcagagtgggctggcagggccggtactgtgacgagtgtatccgctatccaggctgtctccatggcacctgccagcagccctggcagtgcaactgccaggaaggctgggggggccttttctgcaaccaggacctgaactactgcacacaccataagccctgcaagaatggagccacctgcaccaacacgggccaggggagctacacttgctcttgccggcctgggtacacaggtgccacctgcgagctggggattgacgagtgtgaccccagcccttgtaagaacggagggagctgcacggatctcgagaacagctactcctgtacctgcccacccggcttctacggcaaaatctgtgaattgagtgccatgacctgtgcggacggcccttgctttaacgggggtcggtgctcagacagccccgatggagggtacagctgccgctgccccgtgggctactccggcttcaactgtgagaagaaaattgactactgcagctcttcaccctgttctaatggtgccaagtgtgtggacctcggtgatgcctacctgtgccgctgccaggccggcttctcggggaggcactgtgacgacaacgtggacgactgcgcctcctccccgtgcgccaacgggggcacctgccgggatggcgtgaacgacttctcctgcacctgcccgcctggctacacgggcaggaactgcagtgcccccgtcagcaggtgcgagcacgcaccctgccacaatggggccacctgccaccagaggggccacggctatgtgtgcgaatgtgcccgaagctacgggggtcccaactgccagttcctgctccccgagctgcccccgggcccagcggtggtggacctcactgagaagctagagggccagggcgggccattcccctgggtggccgtgtgcgccggggtcatccttgtcctcatgctgctgctgggctgtgccgctgtggtggtctgcgtccggctgaggctgcagaagcaccggcccccagccgacccctgccggggggagacggagaccatgaacaacctggccaactgccagcgtgagaaggacatctcagtcagcatcatcggggccacgcagatcaagaacaccaacaagaaggcggacttccacggggaccacagcgccgacaagaatggcttcaaggcccgctacccagcggtggactataacctcgtgcaggacctcaagggtgacgacaccgccgtcagggacgcgcacagcaagcgtgacaccaagtgccagccccagggctcctcaggggaggagaaggggaccccgaccacactcaggggtggagaagcatctgaaagaaaaaggccggactcgggctgttcaacttcaaaagacaccaagtaccagtcggtgtacgtcatatccgaggagaaggatgagtgcgtcatagcaactgaggtgtaaaatggaagtgagatggcaagactcccgtttctcttaaaataagtaaaattccaaggatatatgccccaacgaatgctgctgaagaggagggaggcctcgtggactgctgctgagaaaccgagttcagaccgagcaggttctcctcctgaggtcctcgacgcctgccgacagcctgtcgcggcccggccgcctgcggcactgccttccgtgacgtcgccgttgcactatggacagttgctcttaagagaatatatatttaaatgggtgaactgaattacgcctaagaagcatgcactgcctgagtgtatattttggattcttatgagccagtcttttcttgaattagaaacacaaacactgcctttattgtcctttttgatacgaagatgtgctttttctagatggaaaagatgtgtgttattttttggatttgtaaaaatatttttcatgatatctgtaaagcttgagtattttgtgatgttcgttttttataatttaaattttggtaaatatgtacaaaggcacttcgggtctatgtgactatatttttttgtatataaatgtatttatggaatattgtgccaatgttatttgagttttttactgttttgttaatgaagaaattcctttttaaaatatttttccaaaataaattttatgaggaattc

SEQ ID NO: 342 - DNA, 3366 bp, Homo sapiens
aaaaaaccaggaagtgaagtccccgagcacgttagaaagcctgacatggcctgactcgggacagctcagagcagggcagaactggggacactctgggccggccttctgcctgcatggacgctctgaagccaccctgtctctggaggaaccacgagcgagggaagaaggacagggactcgtgtggcaggaagaactcagagccgggaagcccccattcactagaagcactgagagatgcggccccctcgcagggtctgaatttcctgctgctgttcacaaagatgctttttatctttaactttttgttttccccacttccgaccccggcgttgatctgcatcctgacatttggagctgccatcttcttgtggctgatcaccagacctcaacccgtcttacctcttcttgacctgaacaatcagtctgtgggaattgagggaggagcacggaagggggtttcccagaagaacaatgacctaacaagttgctgcttctcagatgccaagactatgtatgaggttttccaaagaggactcgctgtgtctgacaatgggccctgcttgggatatagaaaaccaaaccagccctacagatggctatcttacaaacaggtgtctgatagagcagagtacctgggttcctgtctcttgcataaaggttataaatcatcaccagaccagtttgtcggcatctttgctcagaataggccagagtggatcatctccgaattggcttgttacacgtactctatggtagctgtacctctgtatgacaccttgggaccagaagccatcgtacatattgtcaacaaggctgatatcgccatggtgatctgtgacacaccccaaaaggcattggtgctgatagggaatgtagagaaaggcttcaccccgagcctgaaggtgatcatccttatggacccctttgatgatgacctgaagcaaagaggggagaagagtggaattgagatcttatccctatatgatgctgagaacctaggcaaagagcacttcagaaaacctgtgcctcctagcccagaagacctgagcgtcatctgcttcaccagtgggaccacaggtgaccccaaaggagccatgataacccatcaaaatattgtttcaaatgctgctgcctttctcaaatgtgtggagcatgcttatgagcccactcctgatgatgtggccatatcctacctccctctggctcatatgtttgagaggattgtacaggctgttgtgtacagctgtggagccagagttggattcttccaaggggatattcggttgctggctgacgacatgaagactttgaagcccacattgtttcccgcggtgcctcgactccttaacaggatctacgataaggtacaaaatgaggccaagacacccttgaagaagttcttgttgaagctggctgtttccagtaaattcaaagagcttcaaaagggtatcatcaggcatgatagtttctgggacaagctcatctttgcaaagatccaggacagcctgggcggaagggttcgtgtaattgtcactggagctgcccccatgtccacttcagtcatgacattcttccgggcagcaatgggatgtcaggtgtatgaagcttatggtcaaacagaatgcacaggtggctgtacatttacattacctggggactggacatcaggtcacgttggggtgcccctggcttgcaattacgtgaagctggaagatgtggctgacatgaactactttacagtgaataatgaaggagaggtctgcatcaagggtacaaacgtgttcaaaggatacctgaaggaccctgagaagacacaggaagccctggacagtgatggctggcttcacacaggagacattggtcgctggctcccgaatggaactctgaagatcatcgaccgtaaaaagaacattttcaagctggcccaaggagaatacattgcaccagagaagatagaaaatatctacaacaggagtcaaccagtgttacaaatttttgtacacggggagagcttacggtcatccttagtaggagtggtggttcctgacacagatgtacttccctcatttgcagccaagcttggggtgaagggctcctttgaggaactgtgccaaaaccaagttgtaagggaagccattttagaagacttgcagaaaattgggaaagaaagtggccttaaaacttttgaacaggtcaaagccatttttcttcatccagagccattttccattgaaaatgggctcttgacaccaacattgaaagcaaagcgaggagagctttccaaatactttcggacccaaattgacagcctgtatgagcacatccaggattaggataaggtacttaagtacctgccggcccactgtgcactgcttgtgagaaaatggattaaaaactattcttacatttgttttgcctttcctcctatttttttttaacctgttaaactctaaagccatagcttttgttttatattgagacatataatgtgtaaacttagttcccaaataaatcaatcctgtctttcccatcttcgatgttgctaatattaaggcttcagggctacttttatcaacatgcctgtcttcaagatcccagtttatgttctgtgtccttcctcatgatttccaaccttaatactattagtaaccacaagttcaagggtcaaagggaccctctgtgccttcttctttgttttgtgataaacataacttgccaacagtctctatgcttatttacatcttctactgtcaaactaagagatttttaaattctgaaaaactgcttacaattcatgttttctagccactccacaaaccactaaaattttagttttagcctatcactcatgtcaatcatatctatgagacaaatgtctccgatgctcttctgcgtaattaaattgtgtactgaagggaaaagtttgatcataccaaacatttcctaaactctctagttagatatctgacttgggagtataaaaattggtctatgacatattgtccaaaaggaatgctgttcttaaagcattatttacagaaggaactggggagtaaatctgtccctacagtttgctgctgagctggaagctgtgggggaaggagttgacaggtgggcccagtgaacttttccagtaaatgaagcaagcactgaataaaaacctcctgaactgggaacaaagatctacaggcaagcaagatgcccacacaacaggcttattttctgtgaaggaaccaactgatctcccccacccttggattagagttcctgctctaccttacccacagataacacatgctgtttctacttgtaaatgtaaagtctttaaaataaactattacagatacttaaaaaaaaaaaaaaaaa

SEQ ID NO: 343 - DNA, 10101 bp, Homo sapiens
ctttccggggccggcagaggaggatctagacccgcagtactcatggtcgcccacgcagcacttcaatgaggagcgctactcgcccgcgcccaggagcatgaagggcctttccggaagtcggacccagccgccgctgtgttccgggcacacgtgtggtctggcgcccccggaggactgcgagcacctgcaccacgggcccgacgcgcggccgccctacctgctgagccccgccgacagctgccccggggggcgccaccgctgctcgccgcgcagctcggtgcactcggagtgcgtgatgatgccggtggtgctgggcgaccacgtgtccagcagcaccttcccgcggatgcactacagctcgcactacgacacgcgcgacgactgcgctgtggcccacgcgggcgccaagatcaaccgcatcccggccaacctgctggaccagttcgagaagcagctgccgctgcaccgggacggcttccacacgctgcagtaccagaggacgtccgcggccgccgagcagcgcagcgagagccccgggcggatccgccacctggtacactccgtgcagaagctcttcaccaagtcgcactcgctggagggctcctccaaaagcaacgccaacggcaccaaggcggacggccgggcggacgaccaccaccacgcccaccacgccaagcacagcaagaggagcaagagcaaggagcgcaagccggagggcaagccccggcccggcatgagcagctggtggagctcggacgacaacctggacagcgacagcacctatcggacgcccagcgtgctcaaccggcaccacctgggccccgtggcccactgctaccccgacgcgctgcagagccccttcggggacctgtccctcaagacctccaagagcaacaacgacgtcaagtgctcggcctgtgaggggttggcgctgacgcccgacgccaagtacctgaagcgcagctcctggtctacgctgacggtcagccaggccaaggaggcctaccgcaagagctcgctgaacctggacaagccgctgctgcaccaggacgccaagcccgccctgaggccgtgccactacctccaggtacctcaggatgagtggggagggtaccccaccggtggcaaagatgaggagattccctgcaggagaatgagaagtgggagttacattaaagccatgggggacgaggagagcggagagtcagactccagccccaagacatcaccaaagtcggcaatcctaccagagccgctgctgaagtccatcggacagagaccgcttggagagcaccagacccagacctacctgcaagctgcaagcgatgtgcctgtgggacacagcctggaccccgctgcgaactacaactccccgaaattccgctcccggaaccagagctacatgagggccgtcagcaccctgagccaggccagctgcgtgagccaggtgagcgaggcggagatcaatgggcaattcgagtccgtgtgcgagtccgtcttcagtgaagttgaatctcaggccatggatgccctcgacctcccgggatgtttccgaacaaggagtcacagctaccttcgagccattcaagccggctactcccaagatgacgaatgtattcccatgatgacaccctctgacatcacctccaccatcaggtcaacagcagctgtctcatatacaaattacaagaaaacgcccccaccggtgccccctcggaccacctccaagcctctgatctcggtgacggcgcagagcagcaccgaatccacccaggacgcctaccaggacagccgcgcacagaggatgtccccgtggccccaggacagccgcggcctctacaactccacggacagcctggacagcaacaaggccatgaacctcgcgctggaaacggccgctgcccagcgccacctgccagagagccagagcagctctgtgcggaccagcgacaaggccatcctggtgtccaaggcggaggagctcctcaagagccgctgctcctccatcgggattcaggattctgaattcccagagcatcagccatacccaaggtcagatgtggaaacggccacagattctgacacggagagccgcggtctgcgggaataccactctgtcggggtgcaagtggaagatgagaagcgacacggacgttttaaacgttctaacagcgtcacggccgccgtccaagctgacctggagctggaggggttcccaggccacatcaccacggaggacaaaggccttcagttcggctcatccttccagcggcactccgagcccagcacccccacccagtacagcgcggtgagaactgtacggacccaggggctcttcagctatagagaagactatcggacccaagtggacacctccaccctgccccctccagacccctggctggagcccgccatcgacacggtagagactgggaggatgtctccgtgccgcagggatggctcgtggtttttgaagctgctgcacgcagagacaaagaggatggaaggctggtgcaaagagatggagagagaggcggaggagaacgacctctcggaggaaattctcggtaaaatcaggagtgctgttgggagtgcccagcttctcatgtcccagaaattccagcagttttattggctttgccaacagaatatggaccccagcgccatgccgaggccgacgtcgcaggacctggccggctactgggacatgctgcagctctccattgaggacgtcagcatgaagttcgacgagctgcagcggctgcggctcaacgactggaagatgatggagtccccggaaagaaaggaagaaagaaaggtcccgcctccaataccaaagaagcctcccaaggggaagtttcccatcacaagagaaaaatccctggacctgcccgacagacaacgccaggaagcccggaggcgcctcatggccgccaagcgagcggcgtccttccggcagaattccgcctccgagcgcgcggacagcatcgagatctacatccccgaggcccagacccggctctgagggcggaggccggcgccttcccctcgtcgcttccgctttcccggacgcttgtgcagcgcggcgccgccctggtggtttctgtctcctcctcccgctgaacacgtcctcgctcccgcgctccccgcgccccggacacagcgggacgcggccggcggcctcagagtccacggagctcgcggcgaggacgacttctgcttttgttgttgttgttgttgttcacgggtggcctggctcacacttggctctgagggacaggtgtggcgagacctgatttctcctgcgtgttctcagaggacggcgagaaatgcctctggagctggaacccagcttacattttgttatttctatttttataaattgtgtgataattagaggtaagaataacaagtaactataaacgggtgcatcccaccactccctggaggcattagacacccaagtggaaggtgctacaacctgaagcgcaggaaagaaaggcccattcccctcgcacagccgagcttttactccctgagcacgggccgctccgctcccctgctcctgtctgtctcggacagaaaacacgaggctccttgtgtcaagcttcctgtgatggaaagcgacctctccaaccaccacactccccgccgtacagttctccagaatcccaggcgatgacaagtctgaacccacgaaaatacccagcgcagcatctacacattcaaaagataagctgagtgttcccaccaggaagtcacgcgcagagaggagagtcttacggagggctgggagcttaaaaggaaaacaatgtccttacttgtaaacagttattgtattttttatttctttctaacttaaaatacgacacccagtattttctttaagtttcaccatttacgctacatgtgatttttttaatgtatgtatatatatatattctcaaattgctctatcagctgacttttcagggtatccttaaaaaaaaacacacacgaaaaacaaaagtttgcttgtttaaaatgacagttgtgatgtaaaaagtttaagaaatatgaatgtgagtggtaagtatatctcagtttaaatggtaaagaagaaatgtagtttacatttgtatttttccagaattcttttgtcctatgcagtattgctaaagtcgagaatatattccttgcctgtgttagacatgaagggaaaaagaggtcacatattgtgatttccagctgtagcattcaaaaaaaaaattggtgttcatgactctgtggtcggtgccagaggaaaataggaacgactctaattaataggctttctgtgtatataattaaatttagctgctgcaaccattgttctgacacgacttctgtttcacagttcagaccggtcttcaaaggaaaagcctgtccgatttttccatgggttccagtttcagagttctcattattactcaaagtaaaagcggactgcgatttaagatgtttccaccccaatacctggtcttccttcccggcttaaggagtaccatgtacttagccacaggcagaatagctttcgatgaccccatagcactttgtttcttcgccttgatttgcactttacaatgtccccagcccctctgcagcccgtggctggcagggcgttcgatgtgcggttggcccccagcgcgccctccagagctgcggtgtctccctgcctcattccccacatcccactgagcatgggaccattgggagcagagctgatattaaagcatgtttagcttcgaagttttacttttttaaagctgagtagttaagaattccctgtaaaaacaaaaccctgtaaattgagcctcatgtctggtatatattttaccaaacagccttaaaatatatttggaagcaaaaatcagtacgaatgtatctccttgaaaaatgcaaaaaaaaaaaaatccctgaaatattcttctataaatgaatcctatttccccagagtgttcaaggcatttttctacctaaatgaatacctaaatcttgagtagtgtacggtaatgacgcttcttcctatatccactcttattatgttaaaacaaatgtatttgcgagtattggcattttagactttaaaaatgctgtatgatttcagatgaactctgctgtttagaagtaaccacagaaaagcaaagtcagtgtacactctgagtgaaaggaaatgtaatgtggataaaggcccgccacctcctcacattggtctatctactggcagctgatacgtttaactcatttccttgagcttatacaaaacatagaaaagcaaactgttaaagtagtcaataattatttgtctcagatcccagattctatgatccctgcttaaaagaaaatgttcactgcatgtaggttgatttcttatgttttgtagactcattgttatttttcaatccccaaaagtcttggcctaaaccatccctaggggagcagattaacctaccactacattgcacagggttggtgactcgacgtggtgaatgtgcacacgccctgcctggtccgccatgttccaaagaagatgatttaatggtagaacggatacctgctgctagacctgatggaatgttacctgtccgtgttacataatcaagtgcaatatactcagttctcatgcaggtgacattctaccatgaaacgcagaagataagccatgtttctgtattgtacatgtaaagaaaaataaaactgtttatgatacttgtgttagtcactcgagctagcttatttcagccacttctagcagatcatgccatggagctcacgacgtgtgaccatttcgtcatatttaaaatataacttcaagaaaagagtaaacatccattggagaacacggctgaaaattattgtgctgttctaggaacatcatcctagagagtgtgatgttcactataaccccatacctacattccctaatgatacagccaatgacaggtgaaacccagacactctccttagagccgacaggttgatcctgctgtgttgaaggctgtggttaataaaacacaagtatgataaacaggacctagcgtttagcccgggaaaggagaatgctgcttgtcacctagagtgctttccttgtgatgcgtctctcgcatcttcacgtgttgttgtgtttgaagtaaaactagttgttatcgatgacaatttttaccatagttttctcagcaaatttatatcaccatcttagaatggtatataaaaaaattgaactgtttatgataccaaaaaaattacagttttgtttaaaaggaaatgttgatgttttcaactccaaatcaattctaaaaacttcaagcacttaatggaaaggtaaatggtcagataaaaatataattacctgtaaggttatctggttttaaaagaaaaaaaaaaagcctacaaactcagtgacctactacgcagagggaatttttccctgctgcttcttatgaaagtggccaggtttattattagaagacacagtggcagagcacacatgtgcacaggttctgattatttctcttggagcatatgtccttgtcttgatttttgccttttcgatgccatattaagcagccaccgtttccacccctttcattagaaggccctgcatccgtaaattcgcgcatctctgtttttgttagatccttgtaagcatcgctacccgagtccaggatggaatttcacaggaaagtgaagggatactgcaggcctgtgtttgcagcgcctgtggtaactgtggaatgagctctgttagggacagttgtctggtttgtgccaaaccttcgaggggcgagtagggagtgggggaggtgggtccaagtctccctcaggaaggccttttctatcggcagcaattccatcaagccaagcctcctgtggtcctgagcatgaaggggccaggggacctcctgggagatgcagcttttgtttccgctgcgtttcatcagtcagccttgcttggaattctggcaggttccccggggtgtttcagtggacaggaggcccccgtgccgtggctgagtcagcctgggtaccccagtcaccagcagggccacccttgatgacagggccccccacgaacctgggaaaggcagcgggaaatgtgtgagagggtgtgcgctggtacggacataaaagcattgtccaaaacagcgctggttcggggagggcccctggatactgcctttggcccacactgaaaactgaaattgccccacctgtgagcacagaaacacgcttctccaacacgggccgaaataactaaactccacatggttcctgcctgctcatttcccagccctcttcttctcaagcctgaacttcatttttttttttagctgcaaatttaacaggctaatttaaaactgcagttttcagacgacagcccctgggaatgttccagggttctcttgttttgatctgcatgtctgtttacacttctctgtaggcgtgggttgaatacaagtttccaaaactttaaaatagaaaaccacgagcttaagaggtgaaaaagatgacccctttctgattaggatctgtaactctgtgggctgggtcaatgcagtgtgcttcattcagggccatgtggcagccatgacacacaccacataaggtcagctcagagcccatggcttccctgcaggagccccatcttgtcgctattagttgggagttgcaatacattgttggccataaacaaagtgctaaaggaaagggtttgcttctacacattcggctgaatgtcccccagtgcagggtggcagcagaatgttctggaaatgaaggagatattgctaggaatctctaggctgttaggcaacctggcttttattcatcctcagccggcaactcatctcaagtttatgtctcagtttttttcctctagaaaggggattacagttcctgtccctgtcttcctccaggacacactgtgaggattaatgacatattggctctaaagtcctttgagctcctgggaacaggtggtgaaagtgtgcgttactgctaaggattagtccctggcctcttctagaatgccgccctcccagctctgcagggcacgctgccagaatccaggctggtcgtaaacatctcagagataatcagggaccaccagaggcagaggccatgagactgtctttggaaaggtttggaaatgcagaaataactacaagggccattctccttagcttctggctttcaactgtttctagatgcttccaagaacaagaacccagcaccaaccagaattaggccacgttttcaccattacttaagctcaatcgcctcttagatgaaatgaggagataaactaaacattaaaatgatgaaggaaaaaaaattatttggaagccgaaaaccgcatgggtggggaaacatcaggaacgaaatcagacacactgactcaaaccacgcaagggtttgagaagcccacccctctaattccaggcgtttgtaatttttctacttcgcacttgagagaaggcagaggtggtccgtgggaaagctccgggaaacagccgtctttcatccttgccacattgaaaaatgtccacaattttatgaattgctgtcctaaccctggcgtttttatccagtgttaaaataaattatttcaagtttcaatgtaaacacttaacagatgacttctttgcagaagaaatgttcgttacctactatcaaactactttttaacagattttgtatatacacacacaagttgacagaggtttacctccctactttcttagattttatgtaactcttttcattggtgcttattcagaacctgaaagccttgggcatccaagctttcacctactcaatggaggagaggtgataatgaatgaaaagattgacaccaggtttcttggacaaatttaagttcaaatttatctctttcaagtagaccatggtctccctagagagtgtgttggcttgtgtctgccagtacgacaaaggacgctcccagcttgatcgtggtaccttatggaagccactcacgcattctctgatttacccccaaaacactaccatgccccagccccactcatttaaataatacaatcatatcactttcaaagggctcagcacgaatgttcccctcactccactttttaactcgtttgctgaactcgacaaggcttccccttacgagcagtgagacctaggctactttcgaacgcttccttccgaacggtaagccacttcgctctcgggcaggacaggtcctccctgcagagagagacaactcatcccccgaccttccatactacagaccaaaatacccaggtgtggcctaaggactatattaaatgcctcctatagaaattcaaggaatgttagaaccaggaaactagctgtttaaagttttaaagaagtatataaatatatatataaatataaatatgaaatcatatcgagtgtgaggatgagcagagtgccaaatattcagcatctgtacaaagtcattcactggaattcaactattttatgtcattctctttctcacgcttttatggttcttttgataaattctatttagtagcatgcaggatacctaatctgaatgtgcaatatgctattcatcaccacgacaatttcttacttcctcttaataacttaccagaatgttggtcattcctttaaggcagttaaggattgctttatttgtgttcttttttcccatgactttttttcactctcagctgactgtaagaaactgtgcaccgtttccgccataaccgtcctgtgacgatgcctccatttgacttctgtatcgctgatgttcacctcctgtaaatagtttggcaattaaattttttgagaaaagtaatgtttacttttttattggagtgaattctcgtgttattttaatctcagaaaaattatatagaccaaagagttttatccgaaaaaaaattacactcttcctccattatatatttcattgttgaaatatcctcaatttctctatattttaagaagtaatggacatttattaaggttacagatttaatatgtatgcaaaatggtatagattaaatgagtttttaattaataaatcctacagtatttagttaaaaaaaa

SEQ ID NO: 344 - DNA, 7851 bp, Homo sapiens
tgggtcttctaagtaaacggtttgaggagtggtggaggcagaaattaagatttactgagtacttagggtcaagtaaggtgcactggatcgtgttaatcgttaactcgtggaaaccgcccggagtgtgtatgctttctttcttttctttccttttttttttttttgagacggagtttcactcttgtcgcccaggctggcgtgtaatggcatggtcctggctcactgcaactccgcctccagggttcaagcgattcacctgcctcagcctccagagtagctgggattacaggtgcccaccaccacgcccggctaatttttgtatttttagtaaagacgggggtttcaccatgttggccaggatggtctcgaactcctgacctcgggtgattcgccgcctcggcctcccaaagtgctaggattacaggcgtgagtcaccgcgcccggcctggagtgtgtattatcccaattttacggggagtaattgtgctcactcggctcaccaccaagtcgccatagcgcgcctccgcaaggaagccctccaggcacttctactttcccggacccgcctcccgctccagccggttacacgcgccgttagcagcgtgggcggagttggttctgccttcgcggaaccaactggtccagcttctggtgtctcccctcgctcaattaaaagccagctcctctcctttcggcttccccacggtgcctttcgggatttgtagtcagacgcgcttcagccggctctaaggagagcaaaggcaagactccaattcccagcatcccccgcgcccggagagtgcagcgtctattctcatcctcttcacttttccactcctccccttacctcccttctcttctgaattctccattctgggctctttcctgtgaaatctttctttgctttccccatcttttcctcgcattttttcaccatctttccctcaatctccaggagccaatgcgagactttggctccgattaagcgacggcccgagacttggggtgcgcgaggaggatcgacagagtggtgaggggacctaggagggcgggagtggcagaggtatgagagagagagaggtgagtgagaggcgaagagtgagaggaaggcagggagaagctaggagatcggaaggcgtgggtcagggtgaatgacgtgaagtagacttgggaagggaaaagaggtggctttagatttgggaagcatggaggggagaggttaccgccgtacttagcagaagtgggctaagagatagaagataggaaggacgggcagatttggagcttatagactggtctgaccaggatgggatggaagagagaggtgtgggctcaattttctttgtccctgtttagccaaagatgagacaagtcattgaaatacaaaatgatcttgcaaacactggacagttaacaattctgtcacttggtaattgagggaagactggagttgaagggcagaaatagggtgaggaggcaagaaagggagggagattggtcaggtttgggagaaaccagaggagatgagtgacatgggaaaggagaccacagaaaaggtggggttattgtggggactgatggatctggaatcagttagaaaggtcaggggtgacactggcatggatggtgaggttgcacttctgacgtttgcattcctcaggtgatggagagcaccccttcaaggggactgaaccgagtacacctacaatgcaggaatctgcaggaattcttagggggcctgagccctggggtattggaccgattgtatgggcaccctgccacatgtctggctgtcttcaggtgagaagccccttcatggcagggaaatgtaatggggtctgcggactggaataaaatatcataggtaaaagtgtagcagcctggagtcggggtggggactgggagcaagggttggaaattgctctaaagtgtggaggccaaaacagcaggactggtaaagttgtgctggagtgagatgagatgtttgagaggtaattgagggcagagatgcagatacaatgcagcttctgatactaacctttgacctctgtccctgtacagggagctcccatccttggctaagaactgggtgatgcggatgctctttctggagcagcctttgccacaggctgctgtagctctgtgggtaaagaaggaattcagcaagtaagtctcagccagatacaaatttctcaacagctacatttcccaaactgctgttccttggagcacttccaggaagtgttaatagatatatcacaaaacttaaaaataaatacatttgggaaactctgcatattgccttttcccttttatttatttcccagctgagatcttgctttcaaatgtatcttccctcttaaagagttatgtgtgatatctgtaatgaggctctgataagtaatgcagtaaagaatttgtcttaggaagatactaatttcactctgtggaacagtgttccaagggtcagcaagttcagaacaggcagagatggtggcttttatgggcctcctttttgttttccaaataccctactcacctctctgcttctgttccagggctcaggaggaaagtacagggctgctgagcggcctccggatctggcacacccagctgctcccaggcgggctccagggcctcatcctcaaccccattttccgccagaacctccgcattgcccttctgggtgggtatgtcacttctctctcttcctaagctagggcaggggaactgctgcttattaaaccactaattaaactttgggagggggagctcctgggggcctccccagaaccttgtggtctccacgttgggaactcctttaggagtaagttggaccagatgtagtgtgtggtgtaggaaatgtcccccactcatggcccctgaggataagggtggaaagatggcagagggcagcaaggaacacagacagggttccttactctttttttgttgttctgttttgtttgtttttgagacagagtctcactctgtcaccaaggccagagtgcagtggtgtaatcttgactcacggcagcctctacctcctgggttcaagtgattctcctgcctcagcctcctgagtagctgggattacaggcacccaccacgacgccaggctaattttttgtatttttagtagagatggggtttcgccatgttggccaggctggtcttgaactcctgacctcaagtgatccgcccatctcggcctcccaaagtacagggattacaggtgtgagccactgcgcctggccagggttccttactcttggcccatcctggccgtagggggaaggcctggtctgatgacacaagtcagctgggaccagacaagcatgcccgggacgttccctcccttgacaagtacgccgaggagcgatgggaggtaagcacttgggagtgtgtgtgtctctgcttgtgcttcttcttcccatggcccttggggcatggtctccctgttctcttctgttcttcaggtggtcttgcacttcatggtgggctcccccagtgcagctgtcagccaggacttggctcagctcctcagccaggctgggctcatgaagaggtgaggaagccggaggtacagcagctctctgctgtgccatctccttgggttcctaagaaatggtatctggggctagtcaagatcagaggacattagctggaaaaggcaagctgagtagaatatagccagagataccaagaaaaaacgtgagtggacaagtggggatagtagtctttctctgcatatcaccatcattgtcccggtctttgtctctagtactgaacctggagagccgccctgcattacttccgctggcttccagttcctgttgctggacaccccggctcagctctggtactttatgttgcagtatttgcagacagcccaggtgaggaggcagggccacttaaccagcatgctctgctcctctcaggtctcactgagagactcctgcctacagactgttccctgattttctcttctctgtccctttcttcccattgtctccctcccatccctcctcctttgtctctgcctctttctccctagagccggggcatggacctggtagagattctctccttcctcttccagctcagcttctctactctgggcaaggtaagcagggggctgaaaggtatagagatgggaaggggaaagcaagttgtggggcagtagagtagactgagaagataagaatgaaaacagaacgaacagagatggagaaagaaagaatgaatgtatggggttgggggtgggtgggttgtgttttggaccccagctggaaacctctgttcctcaggattactctgtggaaggtatgagtgattctctgttgaacttcctgcaacatctgcgtgagtttgggcttgttttccagaggaaggtatgagcgcctagataagtggcttccagggaagaaacagggtggtgtgttgcctttgcctttaaaaaggagtggggtcttggggcagtagcaggaagcagttgccagaactgaatacttgggtctctcgggggagagaagttgggggttgaggttctgcatcttgggagggatctgatatttcaggcaggaagatgtaaggcagtgacttctgagacaaggcatctgcctttctattcttttcagaggaaatctcggcgttactaccccacacgcctggccatcaatctctcatcaggtgtctctggagctgggggcactgtgcatcagccaggtttcattgtcgtggaaaccaattaccgactgtatgcctacacgggtgaggcgggacagagggcccctggaagaggaggttgggggtgagggaatgccagtttatgttcgtgtttacctggcagtctacagagctctctgacatttctcatgacacttgaaagaagggcttgagggagtctgggtgtgggggtggcctcctcatcctctttctatccctggctcagagtcggagctgcagattgccctcattgccctcttctctgagatgctctatcggttccccaacatggtggtggcgcaggtgacccgggagagtgtgcagcaggcaatcgccagtggcatcacagcccagcaggtattcccacttgggagaggtggagcaggaagacaggctgcacttgggctgcgggggacaggggtcacattatggaaggctagctctgagtctgttataataggtggtggtgagttgtctgtgtttgaagagaaatgaaggctttgggtgtgagaataggtagacccttgaggggaaaaaaacatggagggaggaggtatagatctggatttgtgcctcggcactgccacatcctaactgcgtaaactagacatagttgttttgcctctgtgagcctcagtttcctcatctagtaaatgacagttcttacctcagggttgccgggataattcattggaagaataggggcaaagcattgagctcagcacctgtcatgcaataaatgctaaaaaaagaaaatagtagctgctgctattttaaagaaagaaaaacaaaacattactggaaagggcgaatgtgccagaaaaggaatatcccacgttgctgggagcagcaacgtgggataacagctgaactgggatgggtggagttgatgacaggagttatgagtttttagaataagctgatgttccagtgacattaggtgacagctcagatggctttcctgccttcttgctggagccctcatgccattcttgtctgttttcctagataatccatttcctaaggacaagagcccacccagtgatgctcaaacaggtatagacaggctccaagatgtcagaggctggcagctggtgatgacatgatggaaaagaaaaaggggcatccaaatctggggaagaaacagagggccgggttgtctggggcagtattctgagtccctacagtcaacccttgctccttgcagacacctgtgctgccccccaccatcaccgaccagatccggctctgggagctggaaagggacagactccggttcactgagggtgagtagcttctggtggccaagtcttggtcattggccagagaaagggcagacagttcagtctgcattttattttttacttcatggactaggagagaaaagctggcaagacagttttttgttgttttggggtgagtcggtagtaaacaaatcgtcccaaatcaatgcactttggatttggctaggtgagggaataattcacagtaatttgtattaggcctttctgaatatggctggatcacactggtgttaagatgaacccctgagcagacaagcatagagaattagtttgtaaaattgcggtgggggcaagcccagaccgcgtccagggctgccaccaaggagctggggggattcccaataggagctccgagcttcactttctcgtcttctccccgcgcccctcccgtcctgccgaccccaggtgtcctgtataaccagttcctgtcgcaagtggactttgagctgctgctggcccacgcgcgggagctgggcgtgctcgtgttcgagaactcggccaagcggctcatggtggtgaccccggccgggcacagcgacgtcaagcgcttttggaagcggcagaaacatagctcctgagagcgcgggacttggacacggacctcggcgggcgggactgggcggggcggggcatcagaactcaggtgttttttatttacgcgtcagggcttttcttgtttaataaagttatgatagctagcagtgcggtcccgggcgcctccccgtggggtttgccttcgcggcggactcgctcctctggtctacagcctttggaccggtagggagagggtggggccaaagccagctgctgcgcatgcgccggccggggccccgcccccatgcgccgcgcggctccagggccacgttccagggtcgggtttggtggattcctcagtccctgccgccgcggggcgccctgggatagcggcggggcctcctggtgagcgcgcgccggggcggcctccgggaagtgggagacgctgcgggtcctgggcccaggccttgggatgggcgggaaggcctggccgcgccgggctgtgggcactgcaggaggcccctgtgcaggtggagatcgccgcggccctggcgggactccttgctggctcttgggcgcgctgatgcccatcatctccctgagtttctgagccctatctctcatgtgtcagtggtcaccgccgaatccagacactccggccctgttccggaagagccctgatatccgtggctccatggcgctgtctgtcgataccatgcactctagctctcaaggaggaaaggttttgtggaagggaatagagacttggaataacagacctgtgctaattagagacaggaaagatggaacaaggggagtgacccttctccacccccatatcctaatgtgctctctctctatccagaacagatctcggcccctttccaaacactcctgatgcctcatttgcctctcgcctcttttcgaccaccattttgggggctgaggcactcacggggcctccccaggtttcactccgtttctacacagtcggagccccatggatctcccatctcccggaggaaccgtgaagccaaacagaagcgcctgcgagagaagcaggcgactctggaggctgagatagcaggggagagcaaggttaggggtcagacagcttgtccttgggtttctgagacttgagaggggctggaggagaccggctgaaatgcagtctggggtatactggatcccagcctcttctgctttctcttctcagtcacctgcagaatccattaaggcctggaggcctaaggagttagtattgtatgaaatccctacgaaaccc

SEQ ID NO: 345 - DNA, 4102 bp, Homo sapiens
cagggaaggcgggcgcggaggttctatctgtttcttcctccttcgtgagcagcatggacgtgctagcggaggagtttgggaacctgactccggagcagctggcggcgccgatcccgactgtagaggaaaaatggaggctgcttccagcatttttaaaggtgaaaggccttgtgaaacagcatatagattcatttaactatttcattaatgtagagataaagaagataatgaaagccaatgaaaaggttacaagtgacgctgaccctatgtggtacttaaaatatcttaatatctatgttgggcttcctgatgttgaagaaagcttcaatgtaactagaccagtgtcccctcatgagtgccgtttgagagacatgacatactctgcccctattacagtggatattgaatatacccgaggcagccagaggatcatccgcaatgccttacctatcggcagaatgcccataatgctacgtagttcaaactgtgttcttacaggaaaaacgccagcagaatttgccaaactgaacgaatgtcccttagatccaggtggctacttcattgttaaaggagtagaaaaagttattcttatccaagagcagctgtctaagaacaggatcatcgtggaggctgatagaaaaggggctgttggagcttcagttaccagctctacccatgagaaaaaaagcagaaccaatatggctgtgaaacaaggacgattttatttgaggcataatactttgtcagaagatatacccattgtcatcatatttaaggccatgggtgttgagagtgaccaggaaattgtgcagatgattggaacagcggagcacgtgatggctgcatttgggcccagtctggaagagtgccagaaagctcagattttcacacagatgcaggcattaaaatatatagggaacaaagtaagaaggcaaaggatgtggggaggtggaccaaagaaaaccaaaatagaagaagcaagagagctcctggcttccaccattctgacccatgtcccagttaaggaattcaatttccgagccaaatgtatctatactgcagtgatggtgcgaagagttattctggcccaaggagataataaagttgacgacagagattattatggtaacaagcgactggaattggcaggacagcttttatctcttctttttgaagacttgttcaaaaaatttaattctgaaatgaaaaagattgccgaccaggtgattcctaagcaaagagcagcccagtttgatgttgtcaaacacatgcgccaagaccagatcaccaatggcatggtgaatgctatttctaccggaaattggtctttaaagagatttaaaatggaccgccagggtgtaacccaagtgctgtctcgcttgtcatatatatccgcactgggcatgatgacaagaatctcttcccagtttgaaaaaacgagaaaagtgagtggtcctcgctccctccagccatctcagtggggaatgctgtgtccttcggacactcctgaaggagaggcatgtggtttggttaaaaacttggcccttatgacacacatcacaactgatatggaagatggacccattgttaaattagccagtaacttgggagtagaagatgtgaatttattatgtggggaagagctctcttacccaaatgtgtttcttgtctttcttaatggtaacatcttaggtgtcattcgagaccacaaaaagctagtgaatacatttcgactcatgagaagagcaggatatatcaatgaatttgtttccatctcaacaaatcttacagatcgatgtgtctatatttcttctgatgggggaaggctatgcagaccctacataattgtcaagaaacagaagccagcagtcacaaataaacatatggaagagctggcccaagggtacaggaattttgaagatttcttacatgagagtctggttgaatatttagatgtgaatgaagaaaatgattgtaacattgcactgtacgaacacacaattaataaagacaccacccacttggagattgaacccttcactcttctcggcgtgtgtgctggacttatcccataccctcaccataaccagtcaccgagaaacacttatcagtgtgccatggggaaacaagccatgggtactataggatacaaccagcgaaacagaattgatactctcatgtatctactagcatatccacaaaaacccatggttaagacaaaaaccattgaattgatagaatttgagaaactgccagctggacagaatgcaacagttgctgtgatgagctatagtggctatgatattgaagatgctcttgttttaaacaaggcctctttagacagaggctttgggcgttgccttgtatataaaaatgctaaatgtacgttgaaacgatacaccaatcagacttttgataaagtgatggggcccatgttggatgctgctacaaggaaacctatctggcgacatgaaatcttagatgcagatggtatttgttctccaggtgagaaagtagaaaacaaacaagtgcttgtaaataagtccatgcccacagtgactcagattcctttggaaggaagtaatgtaccacagcaaccacagtacaaagatgtacccataacctacaaaggagcaacagactcatatattgaaaaagtgatgatatcttcaaatgctgaagatgcttttctgatcaaaatgctgctgagacagacaaggcgtccagaaattggagacaaattcagcagtcgtcatgggcaaaaaggtgtttgtggcttgatcgtcccccaggaagacatgccattttgtgattctggcatctgtccggacatcatcatgaacccacacggcttcccatcacgaatgacggtggggaagctcattgagctgctggctggcaaggccggtgtgctggacggcagattccactacggcactgcgtttggaggcagtaaagtgaaggatgtgtgtgaggacctcgttcgccatggttataactacttggggaaagactatgttacatccggcatcacaggtgagcccttagaagcatacatctattttggccccgtgtactatcagaagctgaaacacatggtgctagataaaatgcatgcccgggcccggggcccacgagccgtccttaccaggcaacccactgaaggacggtctcgtgatggtggcttgcgtctcggggaaatggaacgtgactgtttaatcggttatggagccagtatgcttttgctagagagactaatgatttcaagtgatgcctttgaggttgatgtctgtgggcagtgtggacttctggggtattctggctggtgccattactgcaagtcatcctgccacgtgtcttccctccgtattccgtatgcctgcaagctgctcttccaggaactacagtctatgaacatcatccccaggttaaaactgtccaagtacaatgaatgaggatggaaaaaatgattattaaagagaacaagtgatacatccaatgcaacggaaagcagaagggatttaggactacgtctcctcctgtgaagaattcccttgcgtattctctctctaaaacaaccaaaaaaaaatggagaggctttttatatactctaagactggctaaacaaccttgatcattgagcctcgagccatgggagagatgctgaccatgtggactgcaaggctgcttgattcacagatggatgtgacctaaaggataaataagctattacttatgtgctgatctcttgacattcactcattagaagaccttactccttcaagcaaatgtttggggtcaaatttaccatatcttctggctaaccatattcaagattcttctgaaacttggaggatgtaaagaatccatttgatttggtcagcctggcttttgtcgtggtggctggctcggataaattttcccaacaattaaatcttgcctttacacacccaaactttgtaattttagtcttggtgaaatataatgaatttgttcctaccttgtcaagcaagaatgtcgtcttctcctatggactcaattgctattattttaaacctgcatgattgtaccatgcaatactattcgttaaatatctgaatct

SEQ ID NO: 346 - DNA, 3703 bp, Homo sapiens
acggatataagattgcgtgggttctgcctaaagctgaattcccagcgctttggcttctctgagttggggttgtgtataggggtcttcgaacagttccggaaccagccagcagcctttaattcttgggcggaccacggccggttctgtgttcttggctaagatgagcagccaccataccacctttccttttgaccctgagcggcgagtccggagtacgctgaagaaggtctttgggtttgactcttttaagacgcctttacaggagagtgcgaccatggctgtagtaaaaggtaacaaggacgtctttgtgtgcatgcccacaggggcaggaaaatccctatgctatcagctccctgctctgttggccaaaggcatcaccattgtagtctctcctctcattgctttgattcaggaccaagtggaccacttgctaaccctaaaggtacgagtaagttccctgaactcgaagctctctgcacaggaaaggaaggagctgcttgctgacctggagcgagaaaagccccagaccaagattctgtacatcaccccagagatggcagcttcatcctccttccagcccaccctgaactccctggtgtcccgccacctgctgtcttacttggtggtggatgaagctcattgtgtttcccaatgggggcatgactttcgtcctgactacttgcgtctgggtgccctgcgctcccgcctgggacatgccccttgtgtggctctgaccgccacagccaccccacaggtccaagaggacgtgtttgctgccctgcacctgaagaaaccagttgccatcttcaagactccctgcttccgggccaacctcttctatgatgtgcaattcaaggaactgatttctgatccctatgggaacctgaaggacttctgccttaaggctcttggacaggaggctgataaagggttatctggctgcggcattgtgtactgcaggactagagaggcttgtgaacagctggccatagagctcagctgcaggggtgtgaacgccaaggcttaccatgcagggctgaaggcctctgaaagaacgctggtgcagaacgactggatggaggagaaggtccctgtaattgttgcaaccattagttttgggatgggagtggataaagccaatgtcaggtttgtcgcccattggaatattgccaagtctatggctgggtactaccaggagtctggccgggctggcagggatgggaagccttcctggtgccgtctctattactccaggaatgaccgggaccaagtcagcttcctgatcaggaaggaagtagcaaaactccaggaaaagagaggaaacaaagcatctgataaagccactatcatggcctttgatgccctggtgaccttctgtgaagaactggggtgccgccatgccgccattgccaagtacttcggggatgcgctgcctgcctgcgccaaaggctgcgaccactgccagaaccccacggccgtgcggaggcggctggaggccttggagcgcagcagcagctggagcaagacctgcatcgggccctcccaggggaacggctttgaccccgagctgtacgagggaggccgcaagggctacggggacttcagcaggtatgacgaaggttctggaggcagcggggatgaaggcagagatgaggcccacaagcgggagtggaacctcttctatcagaagcagatgcagctgcgcaagggcaaagaccccaagatagaagaatttgtacccccagatgagaactgtcccctgaaagaggcttctagcaggaggatccccaggctgactgtgaaggcacgggagcactgcctgcggcttctggaggaggcgctgagcagcaaccgccagtcaacacgtaccgctgatgaagctgacctccgggccaaggccgtggagctggaacatgagacattccggaacgccaaggtggccaacctctacaaggccagcgtgctgaagaaggtggccgatatccacagagcctccaaggatgggcagccctatgacatgggaggcagtgccaagagctgcagtgcccaagctgagcccccggagcccaatgagtatgacattccaccagcctcccatgtgtactcgctcaaacccaagcgggtgggagctggtttccccaaaggctcctgcccgttccagacggccacggaactgatggagacgactcggatcagggagcaagccccccagcccgagcggggaggcgagcacgagcccccgagccggccctgtggcctcctggatgaggatgggagtgagcccctccctgggcccagaggggaggtccctggaggcagcgctcactatggggggccctcccctgagaagaaggcaaaaagttcctctgggggcagctcccttgccaagggccgggctagcaagaaacagcagctcctagccacagcggcccacaaggattctcagagcatcgcccgcttcttctgccgaagggtggaaagcccagctctgctggcatcagccccagaggcagaaggtgcctgcccctcctgtgagggggttcagggacccccgatggccccagagaagtacacaggggaggaagatggagccgggggacattcgcctgcccctccccagactgaggagtgcctcagggagaggccaagcacctgcccgcccagagaccagggcacccctgaagtccagcccacccctgcaaaggacacatggaagggcaagcggcctcgatcccagcaggagaacccagagagccagcctcagaagaggccacgcccctcagccaagccctccgtcgtagctgaggtcaagggcagcgtctcggccagcgaacagggcaccttgaatcccacggctcaagaccccttccagctctccgctcctggcgtctccttgaaggaggctgcaaatgttgtggtcaagtgcctcacccctttctacaaggagggcaagtttgcttccaaggagttgtttaaaggctttgcccgccacctctcacacttgctgactcagaagacctctcctggaaggagcgtgaaagaagaggcccagaacctcatcaggcacttcttccatggccgggcccggtgcgagagcgaagctgactggcatggcctgtgtggcccccagagatgaccaactgctggctgggcagggcccgcgtcctcccccagattctagcatgggtcatcctgggcctcacctgctgatgccagggccatcgtcttttctcagtccttctcctttccaaccatacttggctttggggatgaccccagacaccccctgaatccaggtcagaggtcagcccacctttctttctgcttgcaaagcctatagacccttctcagagcggtcctcatggctgggttttctgggacacatgtcgaggacagaaggtggagggtggtggagctgctgctggaagaaggggaaggaagagtggcccctccccgagttctaagtcaggatgaggcccacctgtccaaggtatcggaacctacccaggggaccctcagatcctccacccactcccccatccattacgatgccagcttccagccttgcccaggtcagagctgtggcagaggagaggcagccaggccctgttcctgctcagctcctgctcaggaaggccaggcctgacagatgtttgggagaggaataaagttgtgttgttgtggggcatgcaggcgtgcacac

SEQ ID NO: 347 - DNA, 3711 bp, Homo sapiens
  misc_feature (3592)..(3592): "n"=a, t, c or g.
  misc_feature (3662)..(3662): "n"=a, t, c or g.
  misc_feature (3675)..(3675): "n"=a, t, c or g.
  misc_feature (3686)..(3686): "n"=a, t, c or g.
acagggtcgctgagaccagtgcacgagcctcttcggaagatgcatcctggactcttggccgcagaagagaaagcggttggggtctcccagggactctttctaaagggtcagtccaccatggtaggggttaacgtgggtccacccgtatagggaaaggaaagaaattgtatttgacacttcaggggggcgggtggcggacgggtctcgctgcctgattggttttgcatttcatcccaatttttttttctccactctctctccctcttttcagtttctctctctgatcccaggggaggggaaacgggaatagtgagagatcaaaaataaacctcttatgtcaagccgggaaggaagtataaataagaagggctcggcagcccactcggtgcttcccggggtggggaggaggcaggaggcggctgcgcggggctggcgcgggcaggggcggaggacgggcgcacgcgggccggggccagctgctcgcgctcggctcgggggcggcggcgcgggaggagcgggctgcgccagccagaggggccgccgggggagcgctcccgccgccgggccccgcgggcggagtcggccttgcacccgattgattccgttttcctggagagagcggccgggccgcgctcgggccgccagcacctgcccgcgcctggcgggtttttccttttcctgcgcgcagccaccgccgcagcccccatgttccccgcccccgccgccccccggtggcttccgttcctgctgctgctgctgctgctgctgctgccgctggcccgcggcgccccggcccggcccgcagccggggggcaggcctcggagctggtggtgcccacgcggttgcccggcagcgcgggcgagctcgcgctccacctgtccgccttcggcaagggcttcgtgttgcgcctggcgcccgacgacagcttcctggcgcccgagttcaagatcgagcgcctcgggggctccggccgggcgaccgggggcgagcgggggctgcgcggctgttttttttccggcaccgtgaatggggagcccgagtcgctggcggcggtcagcctgtgccgcgggctgagcggctccttcctgctggacggcgaggagttcaccatccagccgcagggcgcggggggctccctggctcagccgcaccgcctgcagcgctggggtcccgccggagcccgccccctcccgcgaggacccgagtgggaggtggagacgggagagggtcagaggcaggagagaggagaccaccaggaggacagcgaggaggagagccaagaagaggaggcagaaggcgctagcgagccgccaccgcccctgggggccacgagtaggaccaagcggtttgtgtctgaggcgcgcttcgtggagacgctgctggtggccgatgcgtccatggctgccttctacggggccgacctgcagaaccacatcctgacgttaatgtctgtggcagcccgaatctacaagcaccccagcatcaagaattccatcaacctgatggtggtaaaagtgctgatcgtagaagatgaaaaatggggcccagaggtgtccgacaatggggggcttacactgcgtaacttctgcaactggcagcggcgtttcaaccagcccagcgaccgccacccagagcactacgacacggccatcctgctcaccagacagaacttctgtgggcaggaggggctgtgtgacaccctgggtgtggcagacatcgggaccatttgtgaccccaacaaaagctgctccgtgatcgaggatgaggggctccaggcggcccacaccctggcccatgaactagggcacgtcctcagcatgccccacgacgactccaagccctgcacacggctcttcgggcccatgggcaagcaccacgtgatggcaccgctgttcgtccacctgaaccagacgctgccctggtccccctgcagcgccatgtatctcacagagcttctggacggcgggcacggagactgtctcctggatgcccctggtgcggccctgcccctccccacaggcctcccgggccgcatggccctgtaccagctggaccagcagtgcaggcagatctttgggccggatttccgccactgccccaacacctctgctcaggacgtctgcgcccagctttggtgccacactgatggggctgagcccctgtgccacacgaagaatggcagcctgccctgggctgacggcacgccgtgcgggcctgggcacctctgctcagaaggcagctgtctacctgaggaggaagtggagaggcccaagcccgtggtagatggaggctgggcaccgtggggaccctggggagaatgttctcggacctgtggaggaggagtacagttttcacaccgtgagtgcaaggaccccgagcctcagaatggaggaagatactgcctgggtcggagagccaagtaccagtcatgccacacggaggaatgcccccctgacgggaaaagcttcagggagcagcagtgtgagaagtataatgcctacaattacactgacatggacgggaatctcctgcagtgggtccccaagtatgctggggtgtccccccgggaccgctgcaagttgttctgccgagcccgggggaggagcgagttcaaagtgttcgaggccaaggtgattgatggcaccctgtgtgggccagaaacactggccatctgtgtccgtggccagtgtgtcaaggccggctgtgaccatgtggtggactcgcctcggaagctggacaaatgcggggtgtgtgggggcaaaggcaactcctgcaggaaggtctccgggtccctcacccccaccaattatggctacaatgacattgtcaccatcccagctggtgccactaatattgacgtgaagcagcggagccacccgggtgtgcagaacgatgggaactacctggcgctgaagacggctgatgggcagtacctgctcaacggcaacctggccatctctgccatagagcaggacatcttggtgaaggggaccatcctgaagtacagcggctccatcgccaccctggagcgcctgcagagcttccggcccttgccagagcctctgacagtgcagctcctgacagtccctggcgaggtcttccccccaaaagtcaaatacaccttctttgttcctaatgacgtggactttagcatgcagagcagcaaagagagagcaaccaccaacatcatccagccgctgctccacgcacagtgggtgctgggggactggtctgagtgctctagcacctgcggggccggctggcagaggcgaactgtagagtgcagggacccctccggccaggcctctgccacctgcaacaaggctctgaaacccgaggatgccaagccctgcgaaagccagctgtgccccctgtgattcaggggggcaggggccagtcttgtgctcctggacatgcggtactgaggtgcagacaaggtctccactgtggtgactgggtcccttggccatatcaaggcagcacggcccacccaggcctcccattgccgcaacccctccagtactgcacaaattcctaagggggaagagaaaaggtatggggcggcaaaacctatcatcaactgtccawtgnaatggaacttgctcgggttcaattaaaggcataagttaaagtaaattcattatgatcaacagacctcacntcatctgttgcangatacaactantaaaaaaaaaaaaaaaaaaaaaaaa

SEQ ID NO: 348 - DNA, 4750 bp, Homo sapiens
gtttagtatttttgagaacccagccacctggccatgctgtaccagccttgtgctgagtgctggggataaaggaacaaataaaacccagtccaggcttctgtgtgcccagccctgtgccgggtcccagtgggtaacagcatgtccaatcccctcagtgtcccactagaggcttcctttggggctgctggggacatcttgtttctagttgagaattcagatttatgtccaaagacaagaactccctgaggggcagattacaacatggactgggccattacaatcaacaaggacacaaagctaacacagccatcgttatacaccagacatgtgctaaggacttgatttccccattgtttaatcatcaccaactccattatcacccccatttcacagatgtggaaactgaggctgagaagagtaagggacttgtccaagggcacagagcaagtcagggctacggtgatgtttcaggcccagacctgtttgcctctggagcccagggtttaacacaccccagtgctgctgtgaaagggctctggacagctcaggctggccggccaatgcggggataaccgaacagaggtatggaacagaaaggggcgttgaggatgttgctgtgtgtgtgcggtggggggagtgacaaggcttcagcaatggtactcattctctccaaccagctcccagtgctgctgtcctctgatccaccctccgctctgcctgccatggactaattgttctgaaatcccatggatcaagtcactcctcagctgaggacctgtccatggctccctggtacccagaggatagaaacccagcattcaaaacctctctaaccagctccccacctcaaccctcacactcctgctcactagcccccaggcgcagtgggctcttccagcggccaagcctgtgcctacggtgccttcttgcctggaatgcccaactcccccttctcagccttctttgactctcaagtaggaaaagcactctttgtctccctgagccccttggcacttatcacagagcactctgggcgttaacttccactgtctccgtcttggattagagtggatctcagagggcccggtggtgtctgcttcacctccctctccactgcagcagcttagcaaggactggccgggtaaactaaaaaatgcaaagagctgagagaatcctgggaaagtgcacatttcccaggactgcccaatgacaagccccgtaccaaggcacagcatcaggataccctgatgtggaagaaccaaaaattgcaccctcatggcttatcaggatggtccttgtgtctgtccctttcaagggttctgataatgaaatctgggcaagtcaccctcctgctttaaaacttccaatggttcccagaggtctagcataaaatccaaactcaagggcccacataacctaggtgctgcctggcccccaggccctcctcttgccacgcccccctccctggccagcctccctcacttctttcagttcctcaaggactccccctcactaaagccttacccaggtcgcctctctgcctagggggctcctccattccctgctcactcagccacctccctctccctcttcaggtctcactttttaggggaggcttccctgatctgtccagataagacctcaccactcccacccaatcccaaacgctcccataacctgatcgtttccttcacagcaagaattaatcttcagtgtaaataatgatctactgaagacctatgaggaatgggaaagtcttgttttttgctgattcttcaacacccagctcagagcctaaatatctctcaaatgaatgaatatatgaatgaatgagtgaatgaacctatatacataaatcaagacaagaaggtgggcagaatcctagggaacactgaggcaggaaaagcagggccctgggccaggcgtcatggctcacacctgtaatcccagcactttgggaggccaaggcaggcagatcacttgaggtcaggactttgagaccagcctggccaacatggtaaaaccctgtctctactaaaaacacaaacattagccgggtatggtggcacatgcctgtagtcccagctactcaagaggctgaggcaggagaatcacttgtacctgggaggaggaggttgcagtgagctgagatcgtgccactgcactccagcctgggcaccacagcaagactccgtctaaaaaaaaaaaagaaaaagaaagaaagaaagaaaaagaaaaccagggccctaactaaaaaagacaggaggaaaaacagggccctaactaaaaagagaggaggggccctaactgaaaaaaccagggccctaactaaaaaagtcaggaggaaaaacagggccctaactaaaaagagaagaggaaataaaccagacagtgcagcctcccagaagcaaaaggagggagtttctggaactgcactagagactggcacatggagtcctgaggaaagagcactggattggacatcgaggaggtcactggggcctccctgattgaaccaaggttccgtggaggtgggcacagggctggtacattgcagggggcagaggagtaaagagggatgaataagcaaagctctcaggcgacggttgctcagctgggtctatgccagcctggccctgcagggtctgcggaagacagggcccctgtgtcatagtcaccaaaagcatcaacagagcataacattctttttgttgacagattacattgaggcaacttggcttttggagttatcagggctcagtctcaaaggcagatgcatcagagccaagacccggccctcaagtcctcctattagggcagcactagggctacctctttgtcagcagaacctttggatagccgctgatggggtgagtcagctttctgggcccggcagaccttttgggaatccctggcttttggggcacaacatcctggggaccaccaaaaagccctttcacctgagctttgggaaagaggaacagctccggctgtgggtggctcatgtcaccatctggaagccagctgggccacagcagacgcgtaagtcctgtattcattcatccccttctccttttggcagaaaagggatggcgtgggttggaggggtgttttcctgggttcttgcacaattgctcattagaaattcacttctgtttgggtgttggaagctgggcgattccccctagtagtgatccttcctgtctcactggtcacaaagccctttggcatctacaagctcgttgggtccacacagcagctttgttaggtgggtagggggagaccaaggcacccatcctacaggtggagaaaccgaggctgaagctgggaggtgagccagtctcctggcttccagcccaggactctgcactcctccccccacctccccacctacttcagcaggtcacctgtgaatctgatagtcaggtgggccccaccctgccagctggccccagcgggcatgactcatccgcttccccatgactcacacacctcaggtgctcctcctctggtcaacaagtccagagacttggcaaatggacccccatttttctcacctctccaaagcctctgggaagaattcctgcacctcctctttatggggactctgctcttctacagaatagcaaccaaggccttgagagggaaagcaactctcctaaagtcacatagcaagcaaccagcacagccagggtgggagccaggcatccgggcaccgagcccagtcccggcctcctccctacaagatcactctcgcctgacctccctctcaaggacaggaaaggagcagagacgcactctgagccttattaggaagacctcagggactcccactgaatccactgtggctacagcggctgcttccaccactgaagtcccctccaggcttccctgggcagccagggcggggtttaagaggacgacaggtgtctgtattgctctacctacctaacaaggctgtgcagggtgaagagtgctgctccgtgggaaggcgctgggaccaaggccgaagcactggacaaagagagctatgagcactacctgtaaacaaagggcacagaatgtcagcctcagggggagttcaaggtcatctggtcaaatccccatttgatgtttcaacccctttcctcccctccaccaggggtcacacaatcagtacttgcacacatccagcaacaccgcactcactacctgccaaggctgcaagacctgctgctggagggtttggctgcgtaaaagaattgtcctaaggatgcactaaaatctctctcttcttatgccttgtacctgctggtattagctctgcctccttttgggtcagccagaacaggtctgtccccctctttcctgatggctctttagagatttgaagacagtgatcctgggcccctcaagtcttctacaaattgtgcaccccctttcctccagctcttcctgagaccagggtttccggttcgctcaccctgttccctgatctgctccagatgaaacctgtccctactgacagcacaagacccagaattagacaatcagtcaagctctatccaggacagggcaagcaggactctcacctccttcattagagatatcatgcttctattaattgagcctaaaatcccatttgcatttaaggcagccctattgcatggctgaattcagtttacagtcaacttcagagctgtacgttagtactctgaagttatataaactgggccctcacttaactgtgtaacttgagcaagcaaaaaaa

SEQ ID NO: 349 - DNA, 3219 bp, Homo sapiens
aagttggacgccccgacccgtgcgagggccaggtccgcgcctgccccgccaggcgaagcgaggcgacccgcgtgcggccatggcttcgctgctgggagcctacccttggcccgagggtctcgagtgcccggccctggacgccgagctgtcggatggacaatcgccgccggccgtcccccggcccccgggggacaagggctccgagagccgtatccggcggcccatgaacgccttcatggtttgggccaaggacgagaggaaacggctggcagtgcagaacccggacctgcacaacgccgagctcagcaagatgctgggaaagtcgtggaaggcgctgacgctgtcccagaagaggccgtacgtggacgaggcggagcggctgcgcctgcagcacatgcaggactaccccaactacaagtaccggccgcgcaggaagaagcaggccaagcggctgtgcaagcgcgtggacccgggcttccttctgagctccctctcccgggaccagaacgccctgccggagaagagaagcggcagccggggggcgctgggggagaaggaggacaggggtgagtactcccccggcactgccctgcccagcctccggggctgctaccacgaggggccggctggtggtggcggcggcggcaccccgagcagtgtggacacgtacccgtacgggctgcccacacctcctgaaatgtctcccctggacgtgctggagccggagcagaccttcttctcctccccctgccaggaggagcatggccatccccgccgcatcccccacctgccagggcacccgtactcaccggagtacgccccaagccctctccactgtagccaccccctgggctccctggcccttggccagtcccccggcgtctccatgatgtcccctgtacccggctgtcccccatctcctgcctattactccccggccacctaccacccactccactccaacctccaagcccacctgggccagctttccccgcctcctgagcaccctggcttcgacgccctggatcaactgagccaggtggaactcctgggggacatggatcgcaatgaattcgaccagtatttgaacactcctggccacccagactccgccacaggggccatggccctcagtgggcatgttccggtctcccaggtgacaccaacgggtcccacagagaccagcctcatctccgtcctggctgatgccacggccacgtactacaacagctacagtgtgtcatagagctggaggcgccccgtccggtcagccctcgcgccctctccttcttgtgccttgagtggcagaggagccgtccagccacaccagctttcctcccaccgctcagggcagggaggtctgaactgcggccccagagcctttggcctaagctggactctccttatccgagtgccgcctctatccccttccccacgttccagcccctgcagcccacattttaagtatattccttcaagtgagttttcctccagcccctgagagttgctgtctcccagtggaatgttcactgacgtcttttcttggtagccatcatcgaaactaatggggggacagacttgatagccaaggtcccttctggtccagttttctgatttagggttctctcaagattaataaaggaagatggggaaatttgactcattaatgagctcgctaacctacgatctggtgataattttgtgtgcacagcccaaggaccacgaggctttctgcactttctgcacccccttccaaagtgaccacaaaatttcaaagggactcatacaatttgagaaaaaacagtcaacctgatttgagaaattaaccagtatggctaactatatcacagaaaatgggattgagttaaaactattttattttaaatatacattttaaagcagttctttttttttgttaatttgtttattatacacacacttcaagagaatatgcacagtctaggccgggcacggtggctcacgcctgtaatcccagcactttgggaggccgaggcatgtggatcacctgaggtcaggagtttgagaccagcctagacaacatggtgaaaccttgtctctatgaaaaatacaaaatttgctgggagtggtggtgcatgcctgtaatcccagctacttggaaggctgaggcaggagaatgtcttgaacctaggaggtggaggttgcagtgagctgagattgcaccattgcactccagcctgtgcaacaagagtgaaactccatttcaagaaaaaaaaaaaaaaaagaatatgcacagtctgaatgtataccaggagtgtgagagacacatgcccacttcatgcaactcctaaactcaaagtctaaatcagatatttttattaacaatgacaacttgttgccaactccctgtttctaatgaccaaagacccagggtacctaaaaggactttgcaaccaagcaaagtcactgtcttcaaatctggatacacactttcccctctgtagattcaaaaggtgcttccttcccggctgtctccagcttccttactctcttttctgggatttctttttctcttctttctgctcttcctccactgctgaactggtccctaactgaaacagcccctgacttatcccaagcatgcttcctttagctgctgtgagaatttgtcttcctcaccagccaggtcctcaggcaaagtcctcagccagtgctttagagcaacttcccgcaaatcagaaactcactgtgattccaaaaatgtttctgagccctggacccctgcccccaaaatattttcatctttcccccaaacctcctttaaaggagcatgcataacagtgtgctgaaagacagttgttggttttttgattttagcatattatttcctgtatgaaatatgttttatataatctcctattatttttatcttatgttttgtattgttgataaatcctttttgtccttctaagatgtcctattgtaaaatcacttataaggtatgattactctttatgctattactttatatgccatttggtaataaatagtaaattgttgatgatatgattgactgatgcgcagtccagagcatgtatgaataatctcataaaacagtatcacagacattaagctaaactgtttcgtttttttgaaagaacaactcatactttggaacagttgtcaatattaatttgttgcaaatatttaatttaaataaacatttttgtaccatgaaaa

SEQ ID NO: 350 - DNA, 3614 bp, Homo sapiens
gtccgccaaaacctgcgcggatagggaagaacagcaccccggcgccgattgccgtaccaaacaagcctaacgtccgctgggccccggacgccgcgcggaaaagatgaatttacaaccaattttctggattggactgatcagttcagtttgctgtgtgtttgctcaaacagatgaaaatagatgtttaaaagcaaatgccaaatcatgtggagaatgtatacaagcagggccaaattgtgggtggtgcacaaattcaacatttttacaggaaggaatgcctacttctgcacgatgtgatgatttagaagccttaaaaaagaagggttgccctccagatgacatagaaaatcccagaggctccaaagatataaagaaaaataaaaatgtaaccaaccgtagcaaaggaacagcagagaagctcaagccagaggatattcatcagatccaaccacagcagttggttttgcgattaagatcaggggagccacagacatttacattaaaattcaagagagctgaagactatcccattgacctctactaccttatggacctgtcttattcaatgaaagacgatttggagaatgtaaaaagtcttggaacagatctgatgaatgaaatgaggaggattacttcggacttcagaattggatttggctcatttgtggaaaagactgtgatgccttacattagcacaacaccagctaagctcaggaacccttgcacaagtgaacagaactgcaccaccccatttagctacaaaaatgtgctcagtcttactaataaaggagaagtatttaatgaacttgttggaaaacagcgcatatctggaaatttggattctccagaaggtggtttcgatgccatcatgcaagttgcagtttgtggatcactgattggctggaggaatgttacacggctgctggtgttttccacagatgccgggtttcactttgctggagatgggaaacttggtggcattgttttaccaaatgatggacaatgtcacctggaaaataatatgtacacaatgagccattattatgattatccttctattgctcaccttgtccagaaactgagtgaaaataatattcagacaatttttgcagttactgaagaatttcagcctgtttacaaggagctgaaaaacttgatccctaagtcagcagtaggaacattatctgcaaattctagcaatgtaattcagttgatcattgatgcatacaattccctttcctcagaagtcattttggaaaacggcaaattgtcagaaggagtaacaataagttacaaatcttactgcaagaacggggtgaatggaacaggggaaaatggaagaaaatgttccaatatttccattggagatgaggttcaatttgaaattagcataacttcaaataagtgtccaaaaaaggattctgacagctttaaaattaggcctctgggctttacggaggaagtagaggttattcttcagtacatctgtgaatgtgaatgccaaagcgaaggcatccctgaaagtcccaagtgtcatgaaggaaatgggacatttgagtgtggcgcgtgcaggtgcaatgaagggcgtgttggtagacattgtgaatgcagcacagatgaagttaacagtgaagacatggatgcttactgcaggaaagaaaacagttcagaaatctgcagtaacaatggagagtgcgtctgcggacagtgtgtttgtaggaagagggataatacaaatgaaatttattctggcaaattctgcgagtgtgataatttcaactgtgatagatccaatggcttaatttgtggaggaaatggtgtttgcaagtgtcgtgtgtgtgagtgcaaccccaactacactggcagtgcatgtgactgttctttggatactagtacttgtgaagccagcaacggacagatctgcaatggccggggcatctgcgagtgtggtgtctgtaagtgtacagatccgaagtttcaagggcaaacgtgtgagatgtgtcagacctgccttggtgtctgtgctgagcataaagaatgtgttcagtgcagagccttcaataaaggagaaaagaaagacacatgcacacaggaatgttcctattttaacattaccaaggtagaaagtcgggacaaattaccccagccggtccaacctgatcctgtgtcccattgtaaggagaaggatgttgacgactgttggttctattttacgtattcagtgaatgggaacaacgaggtcatggttcatgttgtggagaatccagagtgtcccactggtccagacatcattccaattgtagctggtgtggttgctggaattgttcttattggccttgcattactgctgatatggaagcttttaatgataattcatgacagaagggagtttgctaaatttgaaaaggagaaaatgaatgccaaatgggacacgggtgaaaatcctatttataagagtgccgtaacaactgtggtcaatccgaagtatgagggaaaatgagtactgcccgtgcaaatcccacaacactgaatgcaaagtagcaatttccatagtcacagttaggtagctttagggcaatattgccatggttttactcatgtgcaggttttgaaaatgtacaatatgtataatttttaaaatgttttattattttgaaaataatgttgtaattcatgccagggactgacaaaagacttgagacaggatggttattcttgtcagctaaggtcacattgtgcctttttgaccttttcttcctggactattgaaatcaagcttattggattaagtgatatttctatagcgattgaaagggcaatagttaaagtaatgagcatgatgagagtttctgttaatcatgtattaaaactgatttttagctttacatatgtcagtttgcagttatgcagaatccaaagtaaatgtcctgctagctagttaaggattgttttaaatctgttattttgctatttgcctgttagacatgactgatgacatatctgaaagacaagtatgttgagagttgctggtgtaaaatacgtttgaaatagttgatctacaaaggccatgggaaaaattcagagagttaggaaggaaaaaccaatagctttaaaacctgtgtgccattttaagagttacttaatgtttggtaacttttatgccttcactttacaaattcaagccttagataaaagaaccgagcaattttctgctaaaaagtccttgatttagcactatttacatacaggccatactttacaaagtatttgctgaatggggaccttttgagttgaatttattttattatttttattttgtttaatgtctggtgctttctatcacctcttctaatcttttaatgtatttgtttgcaattttggggtaagacttttttatgagtactttttctttgaagttttagcggtcaatttgcctttttaatgaacatgtgaagttatactgtggctatgcaacagctctcacctacgcgagtcttactttgagttagtgccataacagaccactgtatgtttacttctcaccatttgagttgcccatcttgtttcacactagtcacattcttgttttaagtgcctttagttttaacagttca

SEQ ID NO: 351 - DNA, 2236 bp, Homo sapiens
cctcgccgcatccactctccggccggccgcctgcccgccgcctcctccgtgcgcccgccagcctcgcccgcgccgtcaccatgagccaggcctactcgtccagccagcgcgtgtcctcctaccgccgcaccttcggcggcgccccggtcttcccgctcggctccccgctgagctcgcccgtgttcccgcgggcgcctttcggctctaagggctcctccagctcggtgacgtcccgcgtgtaccaggtgtcgcgcacgtcgggaggggccgggggcctggggtcgctgcgggccagccggctggggaccacccgcacgccctcctcctacggcgcaggcgagctgctggacttctcactggccgacgcggtgaaccaggagtttctgaccacgcgcaccaacgagaaggtggagctgcaggagctcaatgaccgttcgccaatctacatggagaaggtgcgcttcctggagcagcagaacgcgctcgccgccgaagtgaaccggctcaagggccgcgagccgacgcgagtggccgagctctacgaggaggagctgcgggagctgcggcgccaggtggaggtgctcactaaccagcgcgcgcgcgtcgacgtcgagcgcgacaacctgctcgacgacctgcagcggctcaaggccaagctgcaggaggagattcagttgaaggaagaagcagagaacaatttggctgccttccgagcggacgtggatgcagctactctagctcgcattgacctggagcgcagaattgaatctctcaacgaggagatcgcgttccttaagaaagtgcatgaagaggagatccgtgagttgcaggctcagcttcaggaacagcaggtccaggtggagatggacatgtctaagccagacctcactgccgccctcagggatatccgggctcagtatgagaccatcgcggctaagaacatttctgaagctgaggagtggtacaagtcgaaggtgtcagacctgacccaggcagccaacaagaacaacgacgccctgcgccaggccaagcaggagatgatggaataccgacaccagatccagtcctacacctgcgagattgacgccctcaagggcactaacgattccctgatgaggcagatgcgggaattggaggaccgatttgccagtgaggccagtggctaccaggacaacattgcacgcctggaggaggaaatccggcacctcaaggatgagatggcccgccatctgcgcgagtaccaggacctgctcaacgtgaagatggccctggatgtggagattgccacctaccggaagctgctggagggagaggagagccggatcaatctccccatccagacctactctgccctcaacttccgagaaaccagccctgagcaaaggggttctgaggtccataccaagaagacggtgatgatcaagaccatcgagacacgggatggggaggtcgtcagtgaggccacacagcagcagcatgaagtgctctaaagacgagagaccctctgccaccagagaccgtcctcacccctgtcctcactgctccctgaagcccagccttcttcatcccaggacaccacacccagcctcagtcctccaaatcacagcctctgacccctcctcactggccatccctcgtggtccccaacagcgacatagcccatccctgcctggtcacaggcatgccccggccacctctgcggaccccagctgtgagccttggctgttggcagtgagtgagcctggctcttgtgctggatggagcccaggcgggagcggtggccctgtccctcccacctctgtgacctcaggcctacgctttggctctggagatagccccagagcagggtgttgggatactgcagggccaggactgagccccgcagacctccccagcccctagcccaggagagagaaagccaggcaggtagcctgggggactagccctgtggagactggggggcttgaaattgtccccgtggtctcttactttcctttccccagcccagggtggacttagaaagcaggggctacaagagggaatccccgaaggtgctggaggtgggagcaggagattgagaaggagagaaagtgggtgagatgctggagaagagaggagaggagagaggcagagagcggtctcaggctggtgggaggggcgcccacctccccacgccctccccccccctgctgcaggggctctggagagaaacaataaagagattcacacacaagcc

SEQ ID NO: 352 - DNA, 2631 bp, Homo sapiens
taagagatttttctacagaatcaatgtctttggttccagcaacaaattatatatatacacccctgaatcaacttaagggtggtacaattgtcaatgtctatggtgttgtgaagttctttaagcccccatatctaagcaaaggaactgattattgctcagttgtaactattgtggaccagacaaatgtaaaactaacttgcctgctctttagtggaaactatgaagcccttccaataatttataaaaatggagatattgttcgctttcacaggctgaagattcaagtatataaaaaggagactcagggtatcaccagctctggctttgcatctttgacgtttgagggaactttgggagcccctatcatacctcgcacttcaagcaagtattttaacttcactactgaggaccacaaaatggtagaagccttacgtgtttgggcatctactcatatgtcaccgtcttggacattactaaaattgtgtgatgttcagccaatgcagtattttgacctgacttgtcagctcttgggcaaagcagaagtggacggagcatcatttcttctaaaggtatgggatggcaccaggacaccatttccatcttggagagtcttaatacaagaccttgttcttgaaggtgatttaagtcacatccatcggctacaaaatctgacaatagacattttagtctacgataaccatgttcatgtggcaagatctctgaaggttggaagctttcttagaatctatagccttcataccaaacttcaatcaatgaattcagagaatcagacaatgttaagtttagagtttcatcttcatggaggtaccagttacggtcggggaatcagggtcttgccagaaagtaactctgatgtggatcaactgaaaaaggatttagaatctgcaaatttgacagccaatcagcattcagatgttatctgtcaatcagaacctgacgacagctttccaagctctggatcagtatcattatacgaggtagaaagatgtcaacagctatctgctacaatacttacagatcatcagtatttggagaggacaccactatgtgccattttgaaacaaaaagctcctcaacaataccgcatccgagcaaaattgaggtcatataagcccagaagactatttcagtctgttaaacttcattgccctaaatgtcatttgctgcaagaagttccacatgagggcgatttggatataatttttcaggatggtgcaactaaaaccccagttgtcaagttacaaaatacatcattatatgattcaaaaatctggaccactaaaaatcaaaaaggacgaaaagtagcagttcattttgtgaaaaataatggtattctcccgctttcaaatgaatgtctacttttgatagaaggaggtacactcagtgaaatttgcaaactctcgaacaagtttaatagtgtaattcctgtgagatctggccacgaagacctggaacttttggacctttcagcaccatttcttatacaaggaacaatacatcactatggatgtaaacagtgttctagtttgagatccatacaaaatctaaattccctggttgataaaacatcgtggattccttcttctgtggcagaagcactgggtattgtacccctccaatatgtgtttgttatgacctttacacttgatgatggaacaggagtactagaagcctatctcatggattctgacaaattcttccagattccagcatcagaagttctgatggatgatgaccttcagaaaagtgtggatatgatcatggatatgttttgtcctccaggaataaaaattgatgcatatccgtggttggaatgcttcatcaagtcatacaatgtcacaaatggaacagataatcaaatttgctatcagatttttgacaccacagttgcagaagatgtaatctaatattgccatccaatttagcatacataaaatgttgccactcaccttccctgtttgagcttcttttcctgacctgagttttgtatcagcaatgttgatgatgttagcatggatatgggattagaaaatgtccttaccttaaatctcttggcttttactgggtgcaaggtaaataatggctatggattttgttttgctttctgttttgcttttgtacaaagagacctgcttaaacaagtactgctgagataagtgtctgatcaagctacagtgtactttaagtagaaatggcaaagttgctttgttggggtgctgatactgatgattttaggataaattcatttctttaaacttgtaatacatggttttattgcttgtttctctccaggatagtagagatttctctatttcacctcaacctaataaaagtggtcagatttataatgttaatgacttaatattatccttttctaatagtctcatgtaaaatatgccgctattacaacttacaactaattgaatgagatgttaacttagtaaaatagtttgatttttacctgacagtgtttgtcaaatttaaaatcatgaatattcaattttatacaaacatttatatatatatatatagatttgtgtatgttatttgccaaagacagatataaattacctggtttaatattagtgaagaataaataagtgcacacat

SEQ ID NO: 353 - DNA, 2308 bp, Homo sapiens
ttagagacgagttttttttttttttctattacttttccccccccctaactaacggactattattgttgttgttttaaatttagctcttagggcttagctatttgggttttcttgcggtgtccggctcccgtctccctggctcccccgcccgccctgcggccccagcgcccctcgctctcatccagcccgcgaggagtgcgggcgccgcgccgcctttaaagcgaggccagggagcgaggcggtgaccggccgagatccggccctcgcctcctccctcggtggcgctagggctcccggcctctcttcctcagtgcgggcggagaagcgaaagcggatcgtcctcggctgccgccgccttctccgggactcgcgcgcccctccccgcgcgcccacccacccagtccggctggactgcggcagccgcgcggctcaccccggcaggatgttcgcagccgggctggctcccttctacgcctccaacttcagcctctggtcggccgcttactgctcctcggccggcccaggcggctgctccttccccttggaccccgccgccgtcaaaaagccctccttctgcatcgcagacattctgcacgccggcgtgggggatctgggggcggccccggagggcctggcaggggcctcggccgccgccctcaccgcgcacttgggctcggttcacccgcacgcctctttccaagcggcggccagatccccgcttcgacccaccccagtggtggcgccctccgaagtcccggctggcttcccgcagcggctgtctccgctctcagccgcctaccaccaccatcacccgcaacaacaacagcagcagcaacagccgcagcagcaacagcctccgcctccgccccgggctggcgccctgcagcccccggcctcggggacgcgagtggttccgaacccccaccacagtggctctgccccggccccctccagcaaagacctcaaatttggaattgaccgcattttatctgcagaatttgacccaaaagtcaaagaaggcaacacgctgagagatctcacttccctgctaaccggtgggcggcccgccggggtgcacctctcaggcctgcagccctcggccggccagttcttcgcatctctagatcccattaacgaggcttctgcaatcctgagtcccttaaactcgaacccaagaaattcagttcagcatcagttccaagacacgtttccaggtccctatgctgtgctcacgaaggacaccatgccgcagacgtacaaaaggaagcgttcatggtcgcgcgctgtgttctccaacctgcagaggaaaggcctggagaaaaggtttgagattcagaagtacgtgaccaagccggaccgaaagcagctggcggcgatgctgggcctcacggacgcacaggtgaaggtgtggttccagaaccggcggatgaagtggcggcactccaaggaggcccaggcccaaaaggacaaggacaaggaggctggcgagaagccatcaggtggagccccggctgcggatggcgagcaggacgagaggagccccagccgttctgaaggcgaggctgagagcgagagcagcgactccgagtccctggacatggcccccagcgacacggagcggactgaggggagtgagcgttctctgcaccaaacaacagttattaaggccccggtcactggcgccctcattaccgccagcagtgctgggagtggtgggagcagcggcggcggcggcaatagtttcagcttcagcagcgccagcagtcttagtagcagcagcaccagtgcgggttgcgccagcagccttggcggcggcggcgcctcggagcttctccctgcaacacagcccacagccagcagcgctcccaaaagccccgagccagcccaaggcgcgcttggctgcttatagactgtactagggcggaggggatccgggccttgcgtgcagcctcccaaccatgggctgggttttgtgcttactgtatgttggcgacttggtagggcaggagacgcagcgtggagcctacctcccgacattcacgcttcgccccacgctgctccgactggctgcagcggacactgcccaaagcagaggggagtctcagtgtcctgctagccagccgaacacttctctccggaagcaggctggttcgactgtgaggtgtttgactaaactgtttctctgactcgccccagaggtcgtggctcaaaggcacttaggacgccttaaatttgtaaataaaatgtttactacggttaaaaaaaaaaaaaaaaaaaaaaaaaaaaaaaaaaaaaaaaaaaaaaaaaa

SEQ ID NO: 354 - DNA, 1981 bp, Homo sapiens
  misc_feature (68)..(68): "n"=a, t, c or g.
gtagcttcactaaggtgggatggatagcagggtctcaggcacaaccagtaatggagagacaaaaccantgtatcacaagatggagtttgtgctgtcagtggctggggagatcattggcttaggcaacgtctggaggtttccctatctctgctacaaaaatgggggaggtgccttcttcatcccctacctcgtcttcctctttacctgtggcattcctgtcttccttctggagacagcactaggccagtacactagccagggaggcgtcacagcctggaggaagatctgccccatctttgagggcattggctatgcctcccagatgatcgtcatcctcctcaacgtctactacatcattgtgttggcctgggccctgttctacctcttcagcagcttcaccatcgacctgccctggggcggctgctaccatgagtggaacacagaacactgtatggagttccagaagaccaacggctccctgaatggtacctctgagaatgccacctctcctgtcatcgagttctgggagcggcgggtcttgaagatctctgatgggatccagcacctgggggccctgcgctgggagctggctctgtgcctcctgctggcctgggtcatctgctacttctgcatctggaagggggtgaagtccacaggcaaggtggtgtacttcacggccacatttccttacctcatgctggtggtcctgttaattcgaggggtgacgttgcctggggcagcccaaggaattcagttttacctgtacccaaacctcacgcgtctgtgggatccccaggtgtggatggatgcaggcacccagatattcttctccttcgccatctgtcttgggtgcctgacagccctgggcagctacaacaagtaccacaacaactgctacagcggcaccagctttgtggccggctttgccatcttctccatcctgggcttcatgtctcaggagcagggggtgcccatttctgaggtggccgagtcaggccctggcctggctttcatcgcttacccgcgggctgtggtgatgctgcccttctctcctctctgggcctgctgtttcttcttcatggtcgttctcctgggactggatagccagtttgtgtgtgtagaaagcctggtgacagcgctggtggacatgtaccctcacgtgttccgcaagaagaaccggagggaagtcctcatccttggagtatctgtcgtctccttccctgtggggctgatcatgctcacagagggcggaatgtacgtgttccagctctttgactactatgcggccagtggcatgtgcctcctgttcgtggccatcttcgagtccctctgtgtggcttgggtttacggagccaagcgcttctacgacaacatcgaagacatgattgggtacaggccatggcctcttatcaaatactgttggctcttcctcacaccagctgtgtgcacagccacctttctcttctccctgataaagtacactccgctgacctacaacaagaagtacacgtacccgtggtggggcgatgccctgggctggctcctggctctgtcctcctggtctgcattcctgcctggagcctctacagactcggaaccctcaagggccccttcagagagagaatccgtcagctcatgtgcccagccgaggacctgccccagcggaacccagcaggaccctcggctcccgccacccccaggacctcactgctcagactcacagagctagagtctcactgctagggggcaggcccttggatggtgcctgtgtgcctggccttggggatggctgtggagggaacgtggcagaagcagccccatgtgttccctgcccccgacctggagtggataagacaagaggggtattttggagtccacctgctgagctggaggcctcccactgcaacttttcagctcaggggttgttgaacagatgtgaaaaggccagtgccaagagtgtccctcggagacccttgaaggc

SEQ ID NO: 355 - DNA, 2458 bp, Homo sapiens
ctccggtgtgtctgtcggttgcagtgttggaggtcggcgccggcccccgccttccgcgccccccacgggaaggaagcacccccggtattaaaacgaacggggcggaaagaagccctcagtcgccggccgggaggcgagccgatgccgagctgctccacgtccaccatgccgggcatgatctgcaagaacccagacctcgagtttgactcgctacagccctgcttctacccggacgaagatgacttctacttcggcggccccgactcgacccccccgggggaggacatctggaagaagtttgagctgctgcccacgcccccgctgtcgcccagccgtggcttcgcggagcacagctccgagcccccgagctgggtcacggagatgctgcttgagaacgagctgtggggcagcccggccgaggaggacgcgttcggcctggggggactgggtggcctcacccccaacccggtcatcctccaggactgcatgtggagcggcttctccgcccgcgagaagctggagcgcgccgtgagcgagaagctgcagcacggccgcgggccgccaaccgccggttccaccgcccagtccccgggagccggcgccgccagccctgcgggtcgcgggcacggcggggctgcgggagccggccgcgccggggccgccctgcccgccgagctcgcccacccggccgccgagtgcgtggatcccgccgtggtcttcccctttcccgtgaacaagcgcgagccagcgcccgtgcccgcagccccggccagtgccccggcggcgggccctgcggtcgcctcgggggcgggtattgccgccccagccggggccccgggggtcgcccctccgcgcccaggcggccgccagaccagcggcggcgaccacaaggccctcagtacctccggagaggacaccctgagcgattcagatgatgaagatgatgaagaggaagatgaagaggaagaaatcgacgtggtcactgtggagaagcggcgttcctcctccaacaccaaggctgtcaccacattcaccatcactgtgcgtcccaagaacgcagccctgggtcccgggagggctcagtccagcgagctgatcctcaaacgatgccttcccatccaccagcagcacaactatgccgccccctctccctacgtggagagtgaggatgcacccccacagaagaagataaagagcgaggcgtccccacgtccgctcaagagtgtcatccccccaaaggctaagagcttgagcccccgaaactctgactcggaggacagtgagcgtcgcagaaaccacaacatcctggagcgccagcgccgcaacgaccttcggtccagctttctcacgctcagggaccacgtgccggagttggtaaagaatgagaaggccgccaaggtggtcattttgaaaaaggccactgagtatgtccactccctccaggccgaggagcaccagcttttgctggaaaaggaaaaattgcaggcaagacagcagcagttgctaaagaaaattgaacacgctcggacttgctagacgcttctcaaaactggacagtcactgccactttgcacattttgattttttttttaaacaaacattgtgttgacattaagaatgttggtttactttcaaatcggtcccctgtcgagttcggctctgggtgggcagtaggaccaccagtgtggggttctgctgggaccttggagagcctgcatcccaggatgctgggtggccctgcagcctcctccacctcacctccatgacagcgctaaacgttggtgacggttgggagcctctggggctgttgaagtcaccttgtgtgttccaagtttccaaacaacagaaagtcattccttctttttaaaatggtgcttaagttccagcagatgccacataaggggtttgccatttgatacccctggggaacatttctgtaaataccattgacacatccgccttttgtatacatcctgggtaatgagaggtggcttttgcggccagtattagactggaagttcatacctaagtactgtaataatacctcaatgtttgaggagcatgttttgtatacaaatatattgttaatctctgttatgtactgtactaattcttacactgcctgtatactttagtatgacgctgatacataactaaatttgatacttatattttcgtatgaaaatgagttgtgaaagttttgagtagatattactttatcactttttgaactaagaaacttttgtaaagaaatttactatatatatatgcctttttcctagcctgtttcttcctgttaatgtatttgttcatgtttggtgcatagaactgggtaaatgcaaagttctgtgtttaatttcttcaaaatgtatatatttagtgctgcatcttatagcactttgaaatacctcatgtttatgaaaataaatagcttaaaattaaaaaaaaaaaaaaaaaa

SEQ ID NO: 356 - DNA, 4285 bp, Homo sapiens
gaagacgcccggagcggctgctgcagccagtagcggccccttcaccggctgccccgctcagacctagtcgggaggggtgcgaggcatgcagctgggggcccagctccggtgccgcaccccgtaaagggctgatcttccacctcgccacctcagccacgggacgccaagaccgcatccaattcagacttcttttggtgcttgtgaaactgaacacaacaaaagtatggatatgggaaaccaacatccttctattagtaggcttcaggaaatccaaaaggaagtaaaaagtgtagaacagcaagttatcggcttcagtggtctgtcagatgacaagaattacaagaaactggagaggattctaacaaaacagctttttgaaatagactctgtagatactgaaggaaaaggagatattcagcaagctaggaagcgggcagcacaggagacagaacgtcttctcaaagagttggagcagaatgcaaaccacccacaccggattgaaatacagaacatttttgaggaagcccagtccctcgtgagagagaaaattgtgccattttataatggaggcaactgcgtaactgatgagtttgaagaaggcatccaagatatcattctgaggctgacacatgttaaaactggaggaaaaatctccttgcggaaagcaaggtatcacactttaaccaaaatctgtgcggtgcaagagataatcgaagactgcatgaaaaagcagccttccctgccgctttccgaggatgcacatccttccgttgccaaaatcaacttcgtgatgtgtgaggtgaacaaggcccgaggggtcctgattgcacttctgatgggtgtgaacaacaatgagacctgcaggcacttatcctgtgtgctctcggggctgatcgctgacctggatgctctagatgtgtgcggccggacagaaatcagaaattatcggagggaggtagtagaagatatcaacaaattattgaaatatctggatttggaagaggaagcagacacaactaaagcatttgacctgagacagaatcattccattttaaaaatagaaaaggtcctcaagagaatgagagaaataaaaaatgaacttctccaagcacaaaacccttctgaattgtacctgagctccaaaacagaattgcagggtttaattggacagttggatgaggtaagtcttgaaaaaaacccctgcatccgggaagccaggagaagagcagtgatcgaggtgcaaactctgatcacatatattgacttgaaggaggcccttgagaaaagaaagctgtttgcttgtgaggagcacccatcccataaagccgtctggaacgtccttggaaacttgtctgagatccagggagaagttctttcatttgatggaaatcgaaccgataagaactacatccggctggaagagctgctcaccaagcagctgctagccctggatgctgttgatccgcagggagaagagaagtgtaaggctgccaggaaacaagctgtgaggcttgcgcagaatattctcagctatctcgacctgaaatctgatgaatgggagtactgaaataccagagatctcacttttgatactgttttgcacttcatatgtgcttctatgtatagagagctttcagttcattgatttatacgtgcatatttcagtctcagtatttatgattgaagcaaattctattcagtatctgctgcttttgatgttgcaagacaaatatcattacagcacgttaacttttccattcggatcattatctgtatgatgtggtgtggtttgtttggtttgtccttttttttgcgtttttaatcagaaaacaaaatagaggcagcttttgtagattttaaatgggttgtgcaagcattaaaatgcaggtctttcagaatctagaactaggcataaccttacataatactaggaaaattatgagaaaggggaaatttttggttaaataagagtaaggttcaaacacaagcagtacatgttctgtttcattatgctcgatagaaggcttttttttcacttataaggcctgattggtcctacccagcttaacggggtggggtttttttgtttgttcagacagtctgttcttttgtaaacatttttagttggaaaaacagcatctgcattttccccatcctctacgttttagagaggaatcttgtttttgtgtgcaacataagaaaattatgaaaactaatagccaaaaaacctttgagattgcattaaagagaagggataaaggaccagcaataataccttgtaagttgcttttgtttgtaaaatctgagcttatagttttccttagtgagtaaattcataaggatgggaacatttaaattaagttaatgggcctttaaaaaaaaaaaaggaaacactcatacctgtagttggaggatgaatactggagacgggttaccaatgtcaggttatactaaaactaaatcagaaagtctgaatgtagcacataatggttctcttctgttgtccaaggctgtaaaatggacagccttgtcacacctccccggtgctgttttacaacgtgagggtagacgctgtcagtaacccagagggaccaggccttcctaggttttctaggcagtcagctgttaaccactcacttagtaaatgtcataactacacctgctccaggaccaatcagtgaaacctgctcggaattaaaggcttcctctgggtgcctgctgaacaactgagctcatgtcatgggcatgtggtggtttctctgttgcctgaaagagccattaaagtcagtcgtgcgtgaagcatctctcttctaaaggatgtgtatttccataaatgctttctgaggatccggtacaaaatgatttcccaaagttctgaagtgccttgagaacatgtgggtccgagtgttataacagactcctcccccgggtcaccttttgcctggtcatcctgttagagtacatctttggaaatccagggtaatattctctttcagagatgctcattgtgtaactctgtgtagggagatagtcactttaaacagctcaaagtagctagctaaaggagtagccttaaatacctaaaagatgacagaagcatagcccttaacaaatcttcagcttgtctctcagtatttcccaatcatgaaaatcccttgctatgtctttcctactagaaatgttctagaatcgctggacggtggggtcagagggcagtcggtatttaggccgtgagcttcccatactactgcaggtccaactcctggcaaccgcgggctcaaggcaggtcattggaatccacgttttggccacagtagttgtaggattgcttttctgtatcataattttagaatgctcttaaaatcttgaggaagagtttttattttttatttatttttgagatggagtctctgttgcccaggctgcagtgcagtggtgccatctcagctcactgcaacctccacctcccaggttcaagcgattctcctgcctcagccacctgagtagctgggagtacaggcatgtggcaccatgcctggctaatttttgtatttttaatagagttgagatttcaccatgatggtcaggctggtctcgaactcctgacctcgtgatccgcccgcctcggccccccaaagtgctgggattaacgggtgtgagccacggcgcccagcccaggaagagtttttaaattagagctctgtttaattataccactgggaaatcatggttacgcttcaggcatattcttccccagagtactacttacattttaaatttcattttgtaaagttaaatgtcagcattccctttaaaagtgtccattgttctttgaaagtagacgtttcagtcattcttttcaaacaagtgtttgtgtaccttttgccaagctgtgggcatcgtgtgtgagtacagggtgctcagctcttccaccgtcattttgaattgttcacatgggtaattggtcatggaaatgatcagattgaccttgattgactgtcaggcatggctttgtttctagtttcaatctgttctcgttccttgtaccggattattctactcctgcaatgaaccctgttgacaccggatttagctcttgtcggccttcgtggggagctgtttgtgttaatatgagctactgcatgtaattcttaaactgggcttgtcacattgtattgtatttttgtgatctgtaatgaaaagaatctgtactgcaagtaaaacctactccccaaaaatgtgtggctttgggtctgcattaaacgctgtagtccatgttcatgcc

SEQ ID NO: 357 - DNA, 1204 bp, Homo sapiens
cggaacgagggcaacctgcacagccatgcccgggcaagaactcaggacggtgaatggctctcagatgctcctggtgttgctggtgctctcgtggctgccgcatgggggcgccctgtctctggccgaggcgagccgcgcaagtttcccgggaccctcagagttgcactccgaagactccagattccgagagttgcggaaacgctacgaggacctgctaaccaggctgcgggccaaccagagctgggaagattcgaacaccgacctcgtcccggcccctgcagtccggatactcacgccagaagtgcggctgggatccggcggccacctgcacctgcgtatctctcgggccgcccttcccgaggggctccccgaggcctcccgccttcaccgggctctgttccggctgtccccgacggcgtcaaggtcgtgggacgtgacacgaccgctgcggcgtcagctcagccttgcaagaccccaagcgcccgcgctgcacctgcgactgtcgccgccgccgtcgcagtcggaccaactgctggcagaatcttcgtccgcacggccccagctggagttgcacttgcggccgcaagccgccagggggcgccgcagagcgcgtgcgcgcaacggggacgactgtccgctcgggcccgggcgttgctgccgtctgcacacggtccgcgcgtcgctggaagacctgggctgggccgattgggtgctgtcgccacgggaggtgcaagtgaccatgtgcatcggcgcgtgcccgagccagttccgggcggcaaacatgcacgcgcagatcaagacgagcctgcaccgcctgaagcccgacacggagccagcgccctgctgcgtgcccgccagctacaatcccatggtgctcattcaaaagaccgacaccggggtgtcgctccagacctatgatgacttgttagccaaagactgccactgcatatgagcagtcctggtccttccactgtgcacctgcgcgggggaggcgacctcagttgtcctgccctgtggaatgggctcaaggttcctgagacacccgattcctgcccaaacagctgtatttatataagtctgttatttattattaatttattggggtgaccttcttggggactcgggggctggtctgatggaactgtgtatttatttaaaactctggtgataaaaataaagctgtctgaactgttaaaaaaaaaaa

SEQ ID NO: 358 - DNA, 15552 bp, Homo sapiens
atggcgacgagcggcggcgaagaggcggcggcagcggctccggcgccggggaccccggcaacgggggcggacacgaccccgggctgggaggtggctgtgcggcccctgctgtccgcgtcctactccgccttcgagatgaaggagttgccgcagctggtggcctcagtcatcgagagtgaatcagaaatcctgcaccatgagaagcagtacgagccattctactcatcttttgttgcactttccacacactatattacaacagtttgcagtctcattccccggaaccaacttcagtcagtggcagcagcctgtaaagttctaattgagttttctctcctgcgtctggagaatccagatgaggcttgtgctgtgtcccagaaacacttgattctcctaatcaagggcctgtgcactggctgtagccgactagatagaactgaaattatcacatttacagcaatgatgaaatccgccaagctgccccaaacagtgaagacactttcagacgtggaagatcagaaagagctggcctcaccagtaagccctgagttgaggcaaaaggaggtacagatgaattttttgaaccagctgacctcagtttttaaccctagaactgtagcatcacaacctatcagtacacagactctggtggaaggagaaaatgatgagcagtcatctacagatcaagcctcagctatcaaaaccaagaatgtgttcatagctcagaacgtggctagtcttcaagagcttggtggctcggagaagctactgcgtgtatgtttgaacctgccatatttcctacgctatatcaatcggttccaagatgcagttttagctaattccttcttcataatgcctgcaacagtagcagatgccactgctgttcgtaatggctttcattcattggtgattgatgtaactatggcattggataccctttctctacctgtgttggaacctctcaatccttctcgtctacaagatgtgacagtcctcagcctaagttgtctgtatgcaggtgtgagtgtggcaacgtgcatggccatcctccatgtgggtagtgcccagcaagtgcggacagggtccacgagctccaaagaagatgactatgaaagtgacgcagctacaattgtccagaaatgtctcgaaatctatgacatgattggacaagcaatcagcagttctcgccgggctggtggtgagcactatcagaatttccaattgctgggtgcttggtgcttgttaaacagccttttcctcatactgaacctcagtcctactgcgttggctgataaggggaaagagaaggacccactggctgccctccgagtcagagacatcctttctcgtactaaagagggagtgggctcccctaaactggggcctggaaaagggcatcagggatttggggtactctcagtaatattggcaaaccatgccatcaaactgctaacgtctctctttcaagacctacaagtggaggcccttcacaagggttgggagacagatggcccccctgcagccttgagcattatggcccagagcacctccatacagaggattcaacggctgattgactctgtcccactgatgaacctgctcttgacgttactttcaacttcctacagaaaggcatgtgtcctgcagcggcagaggaagggctccatgagcagcgatgccagcgcctccaccgactccaatacttactatgaggacgatttcagtagcacggaggaggacagcagccaagacgatgacagtgagcctattttggggcaatggtttgaggagactatttctcccagtaaagagaaagcagcacctccgcctcctcccccacctcctccactggaaagctctcctcgggttaaaagccccagtaagcaggcccctggtgagaagggcaacattctggcgagtcgcaaagatcctgagttgttcttaggtctggcttccaacattttgaacttcatcacctcttccatgctgaactctcggaacaattttatccgaaactatctgagtgtatctctttcagaacaccatatggccaccctagccagtatcatcaaggaggtggacaaagatggactcaagggttcatcagatgaagagtttgctgcagctctctatcacttcaaccactcactggtaacctctgaccttcagtcacctaacctgcagaacacactgttgcagcagctaggagtggctcctttttctgagggcccttggcccttgtacattcaccctcaaagcctctctgtgctttcacgcctcctgctcatctggcaacataaagccagtgctcaaggtgaccctgacgtcccagaatgccttaaagtttgggacaggtttttgtctacaatgaagcagaatgccctgcaaggtgtggtgcccagtgagacagaggatctgaatgtagaacacctgcagatgctcctcctcattttccacaatttcaccgagacaggccggcgggccatattgtcgctttttgtccagatcatccaggagttgagcgtcaacatggatgctcagatgcgcttcgtgccgcttatcttggctcgcctccttctcatctttgattatctgcttcatcagtactccaaagcccctgtgtatctatttgagcaggtacagcataacctgctaagtcctccctttgggtgggcaagtggatcccaggacagcaacagccgccgggcaaccactcctctctatcatggattcaaagaagtagaagaaaactggtctaagcatttctcatcagatgctgtcccacaccccagattctactgtgtcctgtccccagaagcctcagaggatgatttgaaccgacttgattctgtggcatgtgacgtccttttctccaagcttgtcaagtatgatgagctttatgctgcactgacagccctgcttgcagctgggtcccagcttgatacagttaggagaaaggaaaacaagaatgtaacagccttggaggcctgtgcccttcaatattacttcttgatactgtggaggatcctaggaattttaccaccatcaaagacttacattaaccagctatccatgaactcacctgagatgagcgaatgtgacatcttgcacactctgcgatggtcttctcggctccggatcagctcctatgtcaactggataaaggatcaccttatcaaacagggaatgaaggctgagcatgctagctcgcttctagaactggcatccaccactaagtgtagctcagtgaaatatgatgttgaaatagtagaggaatacttcgctcgacagatctcatccttctgtagtatcgactgtaccaccatcttgcagctgcatgaaattcccagtctgcagtccatctacacccttgatgccgcgatctcaaaggtccaggtctctttggatgagcatttttctaagatggctgctgagactgatcctcataagtcgtctgagattaccaagaacctacttccagccacgctgcaactcattgacacctatgcatcgttcaccagagcctatttgctgcaaaactttaatgaagagggaacaactgagaaaccttccaaggagaaactgcaaggctttgctgctgttttggctattggctctagcaggtgcaaggcaaatactctgggtccgacactggttcagaatttgccatcgtcagtgcagactgtgtgtgagtcctggaacaacatcaataccaatgaatttcccaatattggatcctggcgcaatgcctttgccaatgacaccatcccttcagagagttatattagtgcagtgcaggctgcacacctggggactctctgtagccaaagtctgcccctggctgcttccctgaagcataccctcctctcactggtcaggttgactggagatcttattgtttggtcagatgagatgaacccaccacaggtaattcggacactgctacctcttcttttggaatcaagcactgagagtgttgccgagatcagtagcaactccctggaacgcatcttgggccctgctgagtctgatgagttcttggctcgtgtttatgagaagctgatcactggttgttacaacattctggccaatcatgcagatcctaacagtggactggatgaatccatcctggaggaatgtctccagtacttggaaaagcagctggaaagtagccaggctcgtaaagctatggaggagtttttctctgacagtggagaacttgtacagatcatgatggcaacagccaatgagaacctctctgctaaattctgtaaccgagttttgaaattcttcaccaaactcttccagctgactgagaagagccctaacccgagcctgttgcatctctgtggctccctggcacaactggcctgtgtggaacctgtgcgcctgcaggcctggctcacccgcatgactacatcgcccccaaaagattctgatcagctggatgtaattcaggagaaccggcagctgctgcagttactgaccacatacattgttcgggaaaacagccaagttggggaaggtgtgtgtgctgttcttctgggcaccctgactcccatggcaacagagatgctggccaacggtgatgggactggcttccctgaacttatggttgtgatggccactctggccagtgcaggtcaaggtgctggtcaccttcagcttcataatgctgctgtggattggctgagcagatgcaagaaatacctgtcacagaagaatgtagttgaaaaactgaatgccaatgtaatgcatggaaagcatgtgatgatcttggagtgcacatgccatatcatgtcttacttggctgatgtcacgaatgccctgagccagagtaatggtcaaggcccaagtcatctctcagtggatggggaagagcgggccattgaagtagactcagactgggtggaggagttggcggtggaagaggaagattcccaggctgaggattcagatgaagattctctttgcaataaactctgcacttttacgatcacacagaaagaattcatgaaccagcattggtaccactgtcacacctgtaaaatggtggatggcgtgggtgtctgcacagtgtgtgctaaggtgtgccacaaggatcatgagatttcctatgccaagtatggatccttcttctgtgactgtggagccaaggaagatggcagctgtttggctctggtgaagagaactcctagcagtggcatgagctctaccatgaaggagtcggcatttcagagtgaacccaggatttcagagagtctagtgcgtcatgccagcacctcctcgccagctgacaaagccaaggttaccatcagtgatggaaaggttgctgacgaagagaagcccaagaagagcagcctctgccgcacagtagagggctgccgggaggaattacagaaccaggccaatttctccttcgctcctctcgtgttagacatgcttaatttccttatggatgccattcagaccaacttccagcaagcttcagccgtcgggagcagcagccgtgctcagcaagccctcagtgagctacacactgtggagaaggcagtggagatgacagaccagctgatggttcccaccttagggtcccaggaaggtgcctttgagaatgtgcggatgaattacagtggagaccagggccagaccatccggcagctgatcagtgctcatgtgctcaggcgggtggctatgtgtgtgctctcctctccccatgggcgccgccaacatttggctgtcagccatgagaagggcaagatcaccgttctgcagctctctgcactcctgaagcaagcagattccagcaaaaggaagttaactctgacccgcttggcttctgccccagttccttttactgtgttgagcctcacaggaaatccctgcaaggaagactacttggcggtttgtgggctaaaggactgtcatgtgctcacctttagtagctcaggctctgtttcggatcacttggttttgcaccctcagttggcaacggggaacttcatcatcaaagccgtgtggttacctggttcacagaccgagttatcaattgtcaccgcagactttgttaagatttatgacctgtgtgttgatgccttgagtccaaccttctattttctcctgccaagctcaaagataagagatgttaccttccttttcaatgaggagggaaagaacatcattgttataatgtcttcggctgggtacatctatactcagcttatggaagaggccagcagtgcccagcagggacccttctatgtcactaatgtgttggaaatcaatcatgaggacctgaaggacagtaacagccaggtggcgggcggtggtgtgtccgtgtactactcccacgtgttgcagatgttgttcttcagctattgtcaaggcaaatcattcgcagccaccatcagcaggacaaccctggaggtgttgcaactcttccccatcaacatcaaaagttccaatggtggcagtaagacttctcctgctctttgccagtggtctgaggtgatgaaccaccctggcttggtgtgctgtgtccagcaaactacaggggtgccgctggtagttatggtgaaaccagacacttttcttatccaggagattaagactcttcctgctaaagcgaagatccaagacatggttgctattaggcacacggcctgcaatgagcagcagcggacaacaatgattctgctgtgtgaggatggcagcctgcgcatttacatggccaacgtggagaacacctcctactggctgcagccatccctgcagcccagcagtgtcatcagcatcatgaagcctgttcgaaagcgcaaaacagctacaatcacaacccgcacgtctagccaggtgactttccccattgacttttttgaacacaaccagcagctgacagatgtggagtttggtggtaacgacctcctacaggtctataatgcacaacagataaaacaccggctgaattccactggcatgtatgtggccaacaccaagcccggaggcttcaccattgagattagtaacaacaatagcactatggtgatgacaggcatgcggatccagattgggactcaagcaatagaacgggccccgtcatatatcgagatcttcggcagaactatgcagctcaacctgagtcgctcacgctggtttgacttccccttcaccagagaagaagccctgcaggctgataagaagctgaacctcttcattggggcctcggtggaaccagcaggtgtcaccatgatagatgctgtaaaaatttatggcaagactaaggagcagtttggctggcctgatgagcccccagaagaattcccttctgcctctgtcagcaacatctgcccttcaaatctgaaccagagcaacggcactggagatagcgactcagctgcccccactacgaccagtggaactgtcctggagaggctggttgtgagttctttagaagccctggaaagctgctttgccgttggcccaatcatcgagaaggagagaaacaagaatgctgctcaggagctggccactttgctgttgtccctgccagcacctgccagtgtccagcagcagtccaagagccttctggccagcctgcacaccagccgctcggcctaccacagccacaaggatcaggccttgctgagcaaagctgtgcagtgtctcaacacatctagcaaagagggcaaggatttggaccctgaggtgttccagaggctagtgatcacagctcgctccattgccatcatgcgccccaacaaccttgtccactttacggagtcaaagctgccccagatggaaacagaaggaatggatgaagggaaggaaccgcagaagcagttggaaggagattgctgtagtttcatcacccagcttgtgaaccacttctggaaactccatgcatccaaacccaagaatgccttcttggcacctgcctgccttccaggactaactcatattgaagctactgtcaatgctctggtggacatcatccatggctactgtacctgtgagctggattgtattaacacagcatccaagatctacatgcagatgctcttgtgtcctgatcctgctgtgagcttctcttgtaaacaagctctaattcgagtcctaaggcccaggaacaaacggagacatgtgactttaccctcttcccctcgaagcaacactccaatgggagacaaggatgatgatgacgatgatgatgcagatgagaaaatgcagtcatcagggatcccgaatggtggtcacatccgtcaggaaagccaggaacagagtgaggtggaccatggagattttgagatggtgtctgagtcgatggtcctggagacagctgaaaatgtcaacaatggcaacccctctcccctggaggccctgctggcaggcgcagagggcttcccccccatgctggacatcccacctgatgcagatgacgagaccatggttgaactagccattgccctgagcctgcagcaggaccaacaaggcagcagcagcagtgccctgggcctgcagagcctgggactgtccggccaggcacccagctcttcctctctggacgcaggaaccctctctgacaccacagcatcagctccagcctcagacgacgagggcagtacagcagcgacagatggttctacccttcggacctctcctgctgaccacggtggtagtgtgggctcggagagcgggggcagtgcagtggactcagtggctggcgagcacagtgtatctggccggagcagtgcttatggcgatgctacagctgaggggcatccggctggaccaggaagtgtcagctcaagcactggagccatcagcaccaccactgggcaccaggagggagatggctccgagggagaaggagaaggagaaactgaaggagatgtccacactagcaacaggctgcacatggtccgtctaatgctgttggagagattactgcagaccctgcctcaattacgaaacgttggcggtgtccgggccatcccatacatgcaggtcattctaatgctcactacagatctggatggagaagatgagaaagacaagggggccctagacaacctgctctcccagcttattgctgagttgggtatggataaaaaggatgtctccaagaagaatgagcgcagcgccctgaatgaagtccatctggtagtaatgagactcctgagtgtcttcatgtcccgcaccaaatctggatccaagtcttccatatgtgagtcatcttccctcatctccagtgccacagcagcagctctactgagctctggggctgtggactactgcctgcacgtgctcaaatcactgctggaatattggaagagccaacagaatgacgaggagcctgtggctaccagccagttgctgaaaccacatactacctcctccccacctgacatgagcccattctttctccgccagtatgtgaagggtcatgctgctgatgtgtttgaggcctatactcagcttctaacagaaatggtactgaggcttccttaccaaatcaaaaagattactgacaccaattctcgaatcccacctcctgtctttgaccactcgtggttttactttctctccgagtacctcatgatccagcagactccatttgtgcgccgtcaagtccgcaaacttctgctcttcatctgtggatccaaagagaagtaccgccagctccgggatttgcacaccctggactctcacgtgcgtgggatcaagaagctgctagaagagcaggggatattcctccgggcaagtgtggttacagccagctcaggctccgccttgcaatatgacacactcatcagcctgatggagcacctgaaagcctgtgcagagattgccgcccagcgaaccatcaactggcagaaattctgcatcaaagatgactccgtcctgtacttcctcctccaagtcagtttccttgtggatgagggcgtgtccccagtgctgctgcaactgctctcctgtgctctgtgcggcagcaaggtgctcgctgcactggcagcctcttcgggatcctccagtgcttcttcctcctcagcccctgtggctgccagttctggacaagccacaacacagtccaagtcttccactaaaaagagcaagaaagaagaaaaagaaaaggagaaagatggtgagacctctggcagccaggaggaccagctgtgcacagctctggtgaaccagctgaacaaatttgccgataaggaaaccctgatccagttcctgcgttgtttcctgttagagtccaattcttcctcggtgcgctggcaggcccactgtctgacactgcacatctacagaaattccagcaaatctcaacaggagctcctgctagatctgatgtggtccatctggccagaactcccagcctatggtcgtaaggctgcccagtttgtggacctactaggatatttctccctgaaaactccacaaacagagaagaagttgaaggagtattcacagaaggctgtggagattctgcggactcaaaaccatattcttaccaaccaccccaactcgaacatttataacactttgtctggcttagtggagtttgatggctattacctggagagcgatccctgcctggtgtgtaataacccggaagtaccgttctgttatatcaagctgtcttccattaaagtggacacgcggtacaccaccacccagcaggttgtgaagctcattggcagtcacaccatcagcaaagtgacagtgaaaatcggggatctgaaacggaccaagatggtgcggaccatcaacctgtattataacaaccgaaccgtgcaggccatcgtggagttgaaaaacaagccagctcgctggcacaaagccaagaaggttcagctgacccctggacagacagaggtgaagattgacctgccgttgcccattgtggcctccaatctgatgattgagtttgcagacttctatgaaaactaccaggcctccacagagaccctgcagtgccctcgctgtagtgcctcggtccctgccaacccaggagtctgtggcaactgtggagagaatgtgtaccagtgtcacaaatgcagatccatcaactacgatgaaaaggatcccttcctctgcaatgcctgtggcttctgtaaatatgcccgcttcgacttcatgctctatgccaagccttgctgtgcagtggatcccattgagaatgaagaagaccggaagaaggctgtatccaacatcaatacacttttggacaaagctgatcgagtgtatcatcagctgatgggacaccggccacagctggagaacctgctctgcaaagtgaatgaggcagctccagaaaagccacaggatgactcaggaacagcagggggcatcagctccacttctgccagtgtgaatcgttacatcctgcagttggctcaggagtattgtggagactgcaagaactcttttgatgaactctccaaaatcatccagaaagtctttgcttcgcgcaaagagttgttggaatatgacctacagcagagggaagcagccactaaatcatcccggacctccgtgcagcccacattcactgccagccagtaccgtgccttatccgtcctgggctgtggccacacatcctccaccaagtgctatggctgcgcctcggctgtcacagaacattgtatcacactacttcgggccctggccaccaacccagccttgaggcacatccttgtctcccagggccttatccgggagctctttgattataatcttcgccgaggggctgcggccatgcgggaggaggtccgccagctcatgtgcctcctaactcgagacaacccagaagccacccaacagatgaatgacctgattattggcaaggtctccacagccctgaagagccactgggccaaccccgatctggcaagtagcctgcagtatgaaatgctgctgctgacggattctatctccaaggaggacagctgctgggagctccggttacgctgtgctctcagccttttcctcatggctgtgaacattaagactcctgtggtggttgaaaacattaccctcatgtgcctgaggatcttgcagaagctgataaaaccacctgctcccactagcaagaagaacaaggatgtccccgtcgaggccctcaccacggtgaagccatactgcaatgagatccatgcccaggctcaactgtggctcaagagagaccccaaggcatcctatgatgcctggaagaagtgtcttcctatcagagggatagatggcaatgggaaagcccccagcaaatcagagctccgccatctctatttgactgagaagtatgtgtggaggtggaaacagttcctgagtcgtcgggggaagaggacctcccccttggatctcaaactggggcataacaactggctgcgacaagtgcttttcactccagcaacgcaggccgcacggcaggcagcctgtaccattgtggaagctctagccaccattcccagccgcaagcagcaggtcctggacctgcttaccagttacctggatgagctgagcatagctggggagtgtgcagctgagtacctggctctctaccagaagctcatcacttctgcgcactggaaagtctacttggcagctcggggagtcctaccctatgtgggcaacctcatcaccaaggaaatagctcgtctgctggccctggaggaggctaccctgagtaccgatctgcagcagggttatgcccttaaaagtctcacaggccttctctcctcctttgttgaggtggaatccatcaaaagacattttaaaagtcgcttggtgggtactgtgctgaatggatacctgtgcttgcggaagctggtggtgcagaggaccaagctgatcgatgagacgcaggacatgctgctggagatgctggaggacatgaccacaggtacagaatcagaaaccaaggccttcatggctgtgtgcattgagacagccaagcgctacaatctggatgactaccggaccccggtgttcatcttcgagaggctctgcagcatcatttatcctgaggagaatgaagtcactgagttctttgtgaccctggagaaggatccccaacaagaagacttcttacagggcaggatgcctgggaacccgtatagcagcaatgagccaggcatcgggccgctgatgagggatataaagaacaagatttgccaggactgtgacttagtggccctcctggaagatgacagtggcatggagcttctagtgaacaataaaatcattagtttggaccttcctgtggctgaagtttacaagaaagtctggtgtaccacgaatgagggagagcccatgaggattgtttatcgtatgcgggggctgctgggcgatgccacagaggagttcattgagtccctggactctactacagatgaagaagaagatgaagaagaagtgtataaaatggctggtgtgatggcccagtgtgggggcctggaatgcatgcttaacagactcgcagggatcagagatttcaagcagggacgccaccttctaacagtgctactgaaattgttcagttactgcgtgaaggtgaaagtcaaccggcagcaactggtcaaactggaaatgaacaccttgaacgtcatgctggggaccctaaacctggcccttgtagctgaacaagaaagcaaggacagtgggggtgcagctgtggctgagcaggtgcttagcatcatggagatcattctagatgagtccaatgctgagcccctgagtgaggacaagggcaacctcctcctgacaggtgacaaggatcaactggtgatgctcttggaccagatcaacagcacctttgttcgctccaaccccagtgtgctccagggcctgcttcgcatcatcccgtacctttcctttggagaggtggagaaaatgcagatcttggtggagcgattcaaaccatactgcaactttgataaatatgatgaagatcacagtggtgatgataaagtcttcctggactgcttctgtaaaatagctgctggcatcaagaacaacagcaatgggcaccagctgaaggatctgattctccagaaggggatcacccagaatgcacttgactacatgaaaaagcacatccctagcgccaagaatttggatgccgacatctggaaaaagtttttgtctcgcccagccttgccatttatcctaaggctgcttcggggcctggccatccagcaccctggcacccaggttctgattggaactgattccatcccgaacctgcataagctggagcaggtgtccagtgatgagggcattgggaccttggcagagaacctgctggaagccctgcgggaacaccctgacgtaaacaagaagattgacgcagcccgcagggagacccgggcagagaagaaacgcatggccatggcaatgaggcagaaggccctgggcaccctgggcatgacgacaaatgaaaagggccaggtcgtgaccaagacagcactcctgaagcagatggaagagctgatcgaggagcctggcctcacgtgctgcatctgcagggagggatacaagttccagcccacaaaggtcctgggcatttataccttcacgaagcgggtagccttggaggagatggagaataagccccggaaacagcagggctacagcaccgtgtcccacttcaacattgtgcactacgactgccatctggctgccgtcaggttggctcgaggccgggaagagtgggagagtgccgccctgcagaatgccaacaccaagtgcaacgggctccttccggtctggggacctcatgtccctgaatcagcttttgccacttgcttggcaagacacaacacttacctccaggaatgtacaggccagcgggagcccacgtatcagctcaacatccatgacatcaaactgctcttcctgcgcttcgccatggagcagtcgttcagcgcagacactggcgggggcggccgggagagcaacatccacctgatcccgtacatcattcacactgtgctttacgtcctgaacacaacccgagcaacttcccgagaagagaagaacctccaaggctttctggaacagcccaaggagaagtgggtggagagtgcctttgaagtggacgggccctactatttcacagtcttggcccttcacatcctgccccctgagcagtggagagccacacgtgtggaaatcttgcggaggctgttggtgacctcgcaggctcgggcagtggctccaggtggagccaccaggctgacagataaggcagtgaaggactattccgcttaccgttcttcccttctcttttgggccctcgtcgatctcatttacaacatgtttaagaaggtgcctaccagtaacacagagggaggctggtcctgctctctcgctgagtacatccgccacaacgacatgcccatctacgaagctgccgacaaagccctgaaaaccttccaggaggagttcatgccagtggagaccttctcagagttcctcgatgtggccggtcttttatcagaaatcaccgatccagagagcttcctgaaggacctgttgaactcagtcccctga

SEQ ID NO: 359 - DNA, 2333 bp, Homo sapiens
atggcggagtcggccggagcctcctccttcttcccccttgttgtcctcctgctcgccggcagcggcgggtccgggccccggggggtccaggctctgctgtgtgcgtgcaccagctgcctccaggccaactacacgtgtgagacagatggggcctgcatggtttccattttcaatctggatgggatggagcaccatgtgcgcacctgcatccccaaagtggagctggtccctgccgggaagcccttctactgcctgagctcggaggacctgcgcaacacccactgctgctacactgactactgcaacaggatcgacttgagggtgcccagtggtcacctcaaggagcctgagcacccgtccatgtggggcccggtggagctggtaggcatcatcgccggcccggtgttcctcctgttcctcatcatcatcattgttttccttgtcattaactatcatcagcgtgtctatcacaaccgccagagactggacatggaagatccctcatgtgagatgtgtctctccaaagacaagacgctccaggatcttgtctacgatctctccacctcagggtctggctcagggttacccctctttgtccagcgcacagtggcccgaaccatcgttttacaagagattattggcaagggtcggtttggggaagtatggcggggccgctggaggggtggtgatgtggctgtgaaaatattctcttctcgtgaagaacggtcttggttcagggaagcagagatataccagacggtcatgctgcgccatgaaaacatccttggatttattgctgctgacaataaagataatggcacctggacacagctgtggcttgtttctgactatcatgagcacgggtccctgtttgattatctgaaccggtacacagtgacaattgaggggatgattaagctggccttgtctgctgctagtgggctggcacacctgcacatggagatcgtgggcacccaagggaagcctggaattgctcatcgagacttaaagtcaaagaacattctggtgaagaaaaatggcatgtgtgccatagcagacctgggcctggctgtccgtcatgatgcagtcactgacaccattgacattgccccgaatcagagggtggggaccaaacgatacatggcccctgaagtacttgatgaaaccattaatatgaaacactttgactcctttaaatgtgctgatatttatgccctcgggcttgtatattgggagattgctcgaagatgcaattctggaggagtccatgaagaatatcagctgccatattacgacttagtgccctctgacccttccattgaggaaatgcgaaaggttgtatgtgatcagaagctgcgtcccaacatccccaactggtggcagagttatgaggcactgcgggtgatggggaagatgatgcgagagtgttggtatgccaacggcgcagcccgcctgacggccctgcgcatcaagaagaccctctcccagctcagcgtgcaggaagacgtgaagatctaactgctccctctctccacacggagctcctggcagcgagaactacgcacagctgccgcgttgagcgtacgatggaggcctacctctcgtttctgcccagccctctgtggccaggagccctggcccgcaagagggacagagcccgggagagactcgctcactcccatgttgggtttgagacagacaccttttctatttacctcctaatggcatggagactctgagagcgaattgtgtggagaactcagtgccacacctcgaactggttgtagtgggaagtcccgcgaaacccggtgcatctggcacgtggccaggagccatgacaggggcgcttgggaggggccggaggaaccgaggtgttgccagtgctaagctgccctgagggtttccttcggggaccagcccacagcacaccaaggtggcccggaagaaccagaagtgcagcccctctcacaggcagctctgagccgcgctttcccctcctccctgggatggacgctgccgggagactgccagtggagacggaatctgccgctttgtctgtccagccgtgtgtgcatgtgccgaggtgcgtcccccgttgtgcctggttcgtgccatgcccttacacgtgcgtgtgagtgtgtgtgtgtgtctgtaggtgcgcacttacctgcttgagctttctgtgcatgtgcaggtcgggggtgtggtcgtcatgctgtccgtgcttgctggtgcctcttttcagtagtgagcagcatctagtttccctggtgcccttccctggaggtctctccctcccccagagcccctcatgccacagtggtactctgtgt

SEQ ID NO: 360 - DNA, 6753 bp, Homo sapiens
gcagcctcggccgccgggcaagtagctccgagcggctgcttcccggttgcctcgacgaagacagggggcgccgcgctccgcttgctccgcgcctgagccatgcccagcagccctgtgtaaccaccgagtcccggccggagccgaccgacccagtgtgcgccgtctttcggccgagctgagctttcgtgcacgcaactccctctgccccagccggccccgcgccaccatgccccgggcgactgcacttggggccctggtgtcactgctgctgctgctgccgctgcctcgcggcgccgggggactcggggagcgcccggacgccaccgcagactactcagagctggacggcgaggagggcacggagcagcagctggagcattaccacgacccttgcaaagccgctgtcttttggggagacattgccttagatgaagatgacttgaagctgtttcacattgacaaagccagagactggaccaagcagacagtgggggcaacaggacacagcacaggtgggcttgaagagcaggcatctgagagcagcccagacaccacagccatggacactggcaccaaggaagctggaaaggatggccgggagaataccacactcctgcacagccctgggaccttgcatgccgcagccaagaccttctctccccgggtccgaagagccacaacctcaaggacagagaggatatggcctggaggagtcatcccctacgtcattggagggaacttcactgggagccagagggccatttttaagcaggccatgagacactgggagaagcacacctgtgtgaccttcatagaaaggacggatgaggaaagctttattgtattcagttacagaacctgtggctgttgctcctatgttgggcgccgaggaggaggcccacaggccatatccattgggaagaactgtgacaagtttggcattgtggctcacgagctgggccatgtggttgggttttggcatgaacacacccggccagacagagaccaacatgtcaccatcatcagggaaaacatccagccaggtcaggagtataatttcttaaaaatggaagctggggaagtgagctctctgggagagacatacgactttgacagcatcatgcactacgcccggaacaccttctcaagaggagttttcttagacaccatccttccccgtcaagatgacaatggcgtcaggccaaccattggccagcgcgtgcggctcagtcagggagacatagctcaagcccggaagctgtacaaatgcccagcgtgtggggagaccctgcaggacacaacgggaaacttttctgcacctggtttcccaaatgggtacccatcttactcccactgcgtctggaggatctcggtcaccccaggggaaaagatcgtattaaacttcacatccatggatttgtttaaaagccgactgtgctggtatgattacgtggaggtccgggatggttactggagaaaagccccccttttgggcaggttttgtggcgataagatcccggagcccctcgtctccacggacagccggctctgggtggagttccgcagcagcagcaacatcttgggcaagggcttctttgcagcgtacgaagctacctgcgggggagacatgaacaaagatgccggtcagattcaatctcccaactatccggatgactacagaccttccaaggaatgtgtctggaggattacggtttcagaggggtttcacgtgggacttaccttccaagcttttgagattgaaaggcacgacagctgtgcatatgactacctggaagtccgggatggccccacggaagagagtgccctgatcggccacttttgtggctatgagaagccggaggatgtgaaatcgagctccaacagactgtggatgaagtttgtgtccgatggctctatcaataaagcgggctttgcagccaattttttcaaggaggtggatgagtgttcctggccagatcacggcgggtgcgagcatcgctgtgtgaacacgctgggcagctacaagtgtgcctgtgaccctggctacgagctggccgccgataagaagatgtgtgaagtggcctgtggcggtttcattaccaagctgaatggaaccatcaccagccctgggtggccgaaggagtatcccacaaacaaaaactgtgtctggcaggtggtggcccccgctcagtaccggatctcccttcagtttgaagtgtttgaactggaaggcaatgacgtctgtaagtacgactttgtagaggtgcgcagcggcctgtcccccgacgccaagctgcacggcaggttctgcggctctgagacgccggaggtcatcacctcgcagagcaacaacatgcgcgtggagttcaagtccgacaacaccgtctccaagcgcggcttcagggcccacttcttctcagataaggacgagtgtgccaaggacaacggcgggtgtcagcatgagtgcgtcaacaccttcgggagctacctgtgcaggtgcagaaacggctactggctccacgagaatgggcatgactgcaaagaggctggctgtgcacacaagatcagcagtgtggaggggaccctggcgagccccaactggcctgacaaataccccagccggagggagtgtacctggaacatctcttcgactgcaggccacagagtgaaactcacctttaatgagtttgagatcgagcagcaccaggaatgtgcctatgaccacctggaaatgtatgacgggccggacagcctggcccccattctgggccgtttctgcggcagcaagaaaccagaccccacggtggcttccggcagcagtatgtttctcaggttttattcggatgcctcagtgcagaggaaaggcttccaggcagtgcacagcacagagtgcgggggcaggctgaaggctgaagtgcagaccaaagagctctattcccacgcccagtttggggacaacaactacccgagcgaggcccgctgtgactgggtgatcgtggcagaggacggctacggcgtggagctgacattccggacctttgaggttgaggaggaggccgactgcggctacgactacatggaagcctacgacggctacgacagctcagcgcccaggctcggccgcttctgtggctctgggccattagaagaaatctactctgcaggtgattccctgatgattcgattccgcacagatgacaccatcaacaagaaaggctttcatgcccgatacaccagcaccaagttccaggatgccctgcacatgaagaaatagtgctgatgttcttgaaagacagaaactgagaattttttttgttttgttttgtttttaacaacaatagcaccttgaaaatctgccctaaaacagtgtacagtatttttctcaaacaaaaactcagaatccagccttagaggtatatatttgaatgaaagtcttgtaagtttggccaacaaggtggagagaaaaatgttcttttgcttctgtctgcaatgttatcattcatgaactgttaaagtgttaaagattaggattgaagtcactgaccattccggctatgcttcttcataccattctccttgtcccttgctcctatgtggcaaaaggtcagccttggggttggccgttcctctaatctggacttgcttgcaaaggtgccaggctgtcttctgtccatgttgggcataagggatgaaaacttggccgagactaatgtgtggcccacagctttggctggaatcattttctttctctctgccagggacatgtcaaccaagaaacctgaaaatatggatggatgtcaggactaaaaaaaggcatcacagtgagcagtgagcacagagggagtttcgagtataagaatcattgtcatgaagttaggagaccacaaagccatttctcagagtcattcactctccttgtccctttggtttccccccctccctaattgcagtgggggctaaggcatccattatgaatacagcagaacatttgctggcgagagtcctgtctgctgagaagacaatattgtggctcgtcctgatatttttttcattcattgactttgagaagactccacctgtgcttggaattccatgggcttcaaagaacatttcttcttttagctttggaggcacttgccgtggcacacctggactccttgacatccaattcaaactgcatttgcaaaatgtgcaaagacctcttatgagggaccaattcaggtcccttatggggtgaacactgttgaagactggttaattataagttatgtaagaatcatcgccttgtggaacaagtcaatcagtgactagcttcctgtagccaatcaggttaaagagtgcgttggtaactttgctctgattaactagtattcaatcaccaacttgcaaacagaattcataacacttggcacttgttctagagaagtgtagaggatgatgtttacataattttagcacctcaaggtataatttaaacagtgaggtagttttgaatggcatttcattaaggcatctatgggcattatgagctaaaagctgtggtatgttagctttaaaagagtatttatgttggaataatttttaaataatgtttacataactgtaagtcctgtttggttgttgttggacgcagggcggcacatgagtgtttttggttagagccaagatagctcccatgcaccggaattcctttgggatgaatcagcatcattttaaacaaagtatatgtaaaaggtgaaaggttatattttttacagatcagaatgtggcaccagaggactgtgtctcattaaagtgattgctgggagcaaaaactagaatgatacaaagaaaggtcagagaaatgcatgggaatattttttccttaaaacagaaaaaaattaaagtattattaataatatatgtctgtatatatgtatgtatgtaaaagatcagctgtcaaagccttaatcaatgcagtgtggaaaatgccaacccctggtcctcgctttactgtgggccctgcaggactggctctccatttcctgcctctcctttcaccaagctctgttttggcctttctcggccctggactgaggctcagcctacacgctcatattgtgcatatggcagaccctgcccagcgtgcgctttgatacagcaaatggagcagctgacctcatggctccaatcccacctgcctgttagggtagattccatttatctgatttttgtattttctgaggttttatttggtctcatcttgtctatgagagttgaaactggaactgggaaacctaagatgggtgttatggttctttctccaaggaaataaaaattctgcagttttaacctttagaagtctaagcaagattaacaaatttcatagaaaagtgggagggagtcagaaacagagttggtgctgctcagcaggacggtgaaacaatgatacttctttttatctctttagtatgaacattttcaaaaacacacagcttcaacaattgtcaccatatggccaatttgcaacaatgggactcttatgaaaaacctttatttaggccttctgtgtgacgtatccacagaaaagagaagctctgattcagctggggctagctgggccgctcctctggaagcccacacttgtggggacttaggcatgacacaggttcttgcaaagaaactagaggctggcttcactagagagagtccattcagcagaaagtcccaggcctctgccttggtgcttccaattatcagtgacctgcctgcaagcatccccagaagcaaacagcagaggtagaagatatcactgcagcctgctttgtgctttaattgggtaccaagctttggggatgacagtgagttgcaagaatagttttagttcagagaattgtcttaggacaacaggctaatgaaggatttggggtctgggtttttagcctggctccgttctggtgtaacccggtctagcaaaagctaagcctggattgcagggcaggaaaaaatctggaattaactttagccagtggaatttcttcaaacagagaaagagaggctgttcattgatccactattccctctattttcctctaaggtaaatatttagaggtatttacctgtaaggtgaagtttcctttttatttctactttacaatttctctctaaagcaagcttgtccaacccttggcccaggacggctttgaatatggcccgacacaaattcgtaaactttttaaaaaacattgtaagattctttctgtgatttttttttttctcgtcagctatcgttagtgtattttatgtgtggcccaagataattcttcttccaatgtggcccagggaagccaaaagatgggacacccctgctgtaaagtttcatatcactcatgaattgctcagctgatttaaataatttgtaaaatcctgctaactagcaaattcacattgagattttctattgattgggtccctttgatagctttcagattggtattgttagcgttccatttgtgaacaaatgttcccttggctttagcagatgtttttaaagtttcttttgtagaccgaacttctgaagagtaataccaaatgcctaaaattttatttttaaaaaggaaaattgtttaaagtattatatgtaaacatatgggtattttttattttgtgtaattttacatttcatgaaatgatgtcagtttcaaagagaaagtggagaggacctaacatatgtctctacctagaacggatggtttcattaaagaatgtggattt

SEQ ID NO: 361 - DNA, 1635 bp, Homo sapiens
tggcatctaagactgtccaggaggttcacccaggagaacctccgttcgacttggagctgttctacgttaagtatagaaatttttcctacttacattgtaaatgggccacaatggaagagctcgaaaaggatcctcgcatcgcacagaagatcaagcgatttaggaataaacaagcccagatgaagcacatttttacggagcctgatgaagacttgttcaatccagactatgtagaagttgatcgcatcttggaggtggcccacaccaaggatgcagaaacaggggaggaggtaacacattacctggtgaagtggtgctcactaccatatgaagaaagcacgtgggagctagaggaagatgtagatcctgcaaaagttaaagaatttgaatctcttcaagttctccctgaaattaagcatgtggagcggcctgcttcagactcctggcagaaacttgagaagtctcgcgagtataagaacagtaaccagctccgggagtaccagctggaagggatgaactggcttctttttaactggtataacagaaaaaactgtattttggctgatgagatgggcctagggaaaaccatccagtccatcacattcctttcagaaatatttctgagaggaatccacggcccttttctcattatcgcccctctctccaccatcactaactgggagcgggagttccggacatggacagagatgaatgccattgtgtaccacggcagccagatcagcaggcagatgatccagcagtatgaaatggtgtacagagacgcccagggaaaccccctttcaggagtcttcaagttccacgtcgtcatcgcaacatttgaaatgatcctagcagactgcccagagttgaagaagattcactggggccggtggaaggacatcctgactcatggccgattcaagtggcatctgaacgagaaggacatggagatgatttgccgtgccctcctggtgtactgtgtcaagcattataagggggacgagaagatcaagagtttcatttgggaactgatcacacctaccaaagatgggcaagcccagaccctccagaaccactcaggcttatctgccccagtccccagagggaggaaggggaagaagacgaagaaccagttgctaatcccagagctaaaggatgcagattggctagccacctgcaaccccgaggtggtcttgcatgatgatggctataagaaacacctcaaacagcactgcaacaaagtacttttgcgagtccggatgctgtactacctaaaagctgaaatactgggagaagcagctgagaaagcatttgaaggatctcctgccagggagctggatgtacctctgcctgacatcgactacatggagatcccagtggactggtgggatgctgaagccgataagtcacttctcattggcgtgttcaagcatggttatgaaaggtacaatgccatgcgagcagacccagcactttgcttcctggagaaagttgggatgcccgatgagaagtccctttctgcagaacagggtgttacagatgggacctcagacattcctgaaaggcaacacagataaagaagacaatgctgaggacaaagtagatggcctccagaaacaaacggaggttccagtg

SEQ ID NO: 362 - DNA, 2751 bp, Homo sapiens
gggagcttccggattgagccggaagtccccccagagcggatgccgcggcgggcctgtgggagcggggtcatcttctctctgctgctgtagctgccatgggcaaaagagaccgagcggaccgcgacaagaagaaatccaggaagcggcactatgaggatgaagaggatgatgaagaggacgccccggggaacgaccctcaggaagcggttccctcggcggcggggaagcaggtggatgagtcaggcaccaaagtggatgaatatggagccaaggactacaggctgcaaatgccgctgaaggacgaccacacctccaggcccctctgggtggctcccgatggccatatcttcttggaagccttctctccagtttacaaatatgcccaagacttcttggtggctattgcagagccagtgtgccgaccaacccatgtgcatgagtacaaactaactgcctactccttgtatgcagctgtcagcgttgggctgcaaaccagtgacatcaccgagtacctcaggaagctcagcaagactggagtccctgatggaattatgcagtttattaagttgtgtactgtcagctatggaaaagtcaagctggtcttgaagcacaacagatacttcgttgaaagttgccaccctgatgtaatccagcatcttctccaggaccccgtgatccgagaatgccgcttaagaaactctgaaggggaggccactgagctcatcacagagactttcacaagcaaatctgccatttctaagactgctgaaagcagtggtgggccctccacttcccgagtgacagatccacagggtaaatctgacatccccatggacctgtttgacttctatgagcaaatggacaaggatgaagaagaagaagaagagacacagacagtgtcttttgaagtcaagcaggaaatgattgaggaactccagaaacgttgcatccacctggagtaccctctgttggcagaatatgacttccggaatgattctgtcaaccctgatatcaacattgacctaaagcccacagctgtcctcagaccctatcaggagaagagcttgcgaaagatgtttggaaacgggcgtgcacgttcgggggtcattgttcttccctgcggtgctggaaagtccctggttggtgtgactgctgcatgcactgtcagaaaacgctgtctggtgctgggcaactcagctgtttctgtggagcagtggaaagcccagttcaagatgtggtccaccattgacgacagccagatctgccggttcacctccgatgccaaggacaagcccatcggctgctccgttgccattagcacctactccatgctgggccacaccaccaaaaggtcctgggaggccgagcgagtcatggagtggctcaagacccaggagtggggcctcatgatcctggatgaagtgcacaccataccagccaagatgttccgaagggtgctcaccatcgtgcaggcccactgtaagctgggtttgactgcgaccctcgtccgcgaagatgacaaaattgtggatttaaattttctgattgggcctaagctctacgaagccaactggatggagctgcagaataatggctacatcgccaaagtccagtgtgctgaggtctggtgccctatgtctcctgaattttaccgggaatatgtggcaatcaaaaccaagaaacgaatcttgctgtacaccatgaaccccaacaaatttagagcttgccagtttctgatcaagtttcatgaaaggaggaatgacaagattattgtctttgctgacaatgtgtttgccctaaaggaatatgccattcgactgaacaaaccctatatctacggacctacgtctcagggggaaaggatgcaaattctccagaatttcaagcacaaccccaaaattaacaccatcttcatatccaaggtaggtgacacttcgtttgatctgccggaagcaaatgtcctcattcagatctcatcccatggtggctccaggcgtcaggaagcccaaaggctagggcgggtgcttcgagctaaaaaagggatggttgcagaagagtacaatgcctttttctactcactggtatcccaggacacacaggaaatggcttactcaaccaagcggcagagattcttggtagatcaaggttatagcttcaaggtgatcacgaaactcgctggcatggaggaggaagacttggcgttttcgacaaaagaagagcaacagcagctcttacagaaagtcctggcagccactgacctggatgccgaggaggaggtggtggctggggaatttggctccagatccagccaggcatctcggcgctttggcaccatgagttctatgtctggggccgacgacactgtgtacatggagtaccactcatcgcggagcaaggcgcccagcaaacatgtacacccgctcttcaagcgctttaggaaatgatgcttaggcagggtacttcgttcaagaccggcgcttggcacccttgttggaaagggattttcagcataacattttccttccacctctttgaccttccctccagcgttggccaaattgtgctgaggaagatgcatcaagggcttggctgtgccttcataggtcatctagggttttataaaggaggaggagacaatattttttcaaactttttggggagtggggtcatttctgtatataaaaaatgttaatatttaaggtgtatttatgttaccgttctgaataaacagaatggaccattgaaccagta

SEQ ID NO: 363 - DNA, 2248 bp, Homo sapiens
caaagaatcccttcaccccctccagggatggctctgagctctcgggcgcgtgccttctccgtggaagccttggtggggagacccagcaaaagaaaactccaagacccaatacaggcggagcagcctgagctgcgggagaaaaagggcggagaggaagaggaggagagaaggagcagcgctgcagggaagagcgagccgcttgaaaaacaacctaagacagagccctcaacatctgcttcctctggctgcggcagcgacagcggctacggcaacagctctgaaagtctggaagagaaagatattcaaatggagcttcaaggatctgaactgtggaaaagattccatgacatcgggactgagatgatcattactaaagcgggcaggcggatgttcccctctgttcgggtcaaggtgaaagggttggatccagggaagcagtaccatgtggccatcgatgtggtgccggtggattccaaacgctataggtacgtctatcacagctcacagtggatggtagctgggaatacagaccatttgtgcatcattcctagattctatgttcacccggactcaccctgctcgggagagacctggatgcggcagatcatcagctttgatcgcatgaaactcaccaacaatgagatggatgacaaaggccacatcattctgcaatccatgcataagtacaaaccccgagtgcacgtgatagagcaaggcagcagtgttgacctgtcccagattcagtccttgcccactgaaggtgttaaaacattctcctttaaagaaactgagttcaccacagtaacggcttaccaaaaccaacagattacgaaactaaaaatagaaagaaatccttttgctaaaggatttagagatactggaagaaacaggggtgtattggatgggcttttagagacctacccatggaggccttctttcactctcgattttaaaacctttggcgcagacacacaaagtggaagcagtggctcatctccagtgacctctagtggaggggccccctctcctttgaactccttactttctccactttgcttttcacctatgtttcatttacctacaagctcccttggaatgccctgtccagaggcatacctgcccaatgtcaacctgcctctatgctacaagatttgtccaactaatttttggcaacagcaacctcttgttttaccggctcctgaaagactagcaagcagcaacagttctcagtctttagccccactcatgatggaagtgcctatgttatcttccctgggggtcaccaattcaaaaagcggttcatctgaagactccagtgatcagtatctacaagcacctaattctaccaatcaaatgttatatggattacagtcacctggaaatatttttctgccaaactccatcaccccagaagcacttagttgctcctttcatccttcctatgacttttatagatacaatttctctatgccatctagactgataagtggttccaaccatcttaaagtgaatgacgacagtcaagtttcttttggagaaggcaaatgtaatcatgttcattggtatccagcaattaaccattacctttagtaagacaatagcatttctagaacaattacatgtaaacaaatattttctttatttgtagccaaagaaatttcaacagttattgggcttaaaaagcatcattacaatacagtatttctttgttatacatttaaagatttaaagtgccttatcaaataatattcatgaagagttgtttataatgtcaaatgaaacctacaggaatctctgattacagtggccttgagcttcaaaatgagatatgcaataaatattatttgatgatactccaccagtgaaaattgatgctaagtgatgggattttcaattatactgaagctagttcaccacgttaactgcattttacacattgacaatgacaaaaagaagatggatgtaattctcatgaaagcagtgaagcaatttcagttttaaaaatgaagatcggctttcatgtaattatctagtagttgtagaagaaaatttaattatttgtttgcctcatgcctttatactttgctgttgaagaaactactaatctcaatttaagatacaaataaggacacaaactttcaagtattatattttatttatctttgtagcctaaagaccatttaatcttgaaggaacacaaagatcaaatgaaaagtaaaacactctaaataaatttgcttttattttc

SEQ ID NO: 364 - DNA, 3525 bp, Homo sapiens
  misc_feature (2664)..(2664): "n"=a, t, c or g.
  misc_feature (3331)..(3331): "n"=a, t, c or g.
  misc_feature (3345)..(3345): "n"=a, t, c or g.
  misc_feature (3360)..(3360): "n"=a, t, c or g.
  misc_feature (3416)..(3416): "n"=a, t, c or g.
  misc_feature (3419)..(3419): "n"=a, t, c or g.
  misc_feature (3462)..(3462): "n"=a, t, c or g.
  misc_feature (3496)..(3496): "n"=a, t, c or g.
ggcacgaggcatggcgctgaggggccgccccgcgggaagatgaataagggctggctggagctggagagcgacccaggcctcttcaccctgctcgtggaagatttcggtgtcaagggggtgcaagtggaggagatctacgaccttcagagcaaatgtcagggccctgtatatggatttatcttcctgttcaaatggatcgaagagcgccggtcccggcgaaaggtctctaccttggtggatgatacgtccgtgattgatgatgatattgtgaataacatgttctttgcccaccagctgatacccaactcttgtgcaactcatgccttgctgagcgtgctcctgaactgcagcagcgtggacctgggacccaccctgagtcgcatgaaggacttcaccaagggtttcagccctgagagcaaaggatatgcgattggcaatgccccggagttggccaaggcccataatagccatgccaggcccgagccacgccacctccctgagaagcagaatggccttagtgcagtgcggaccatggaggcgttccactttgtcagctatgtgcctatcacaggccggctctttgagctggatgggctgaaggtctaccccattgaccatgggccctggggggaggacgaggagtggacagacaaggcccggcgggtcatcatggagcgtatcggcctcgccactgcaggggagccctaccacgacatccgcttcaacctgatggcagtggtgcccgaccgcaggatcaagtatgaggccaggctgcatgtgctgaaggtgaaccgtcagacagtactagaggctctgcagcagctgataagagtaacacagccagagctgattcagacccacaagtctcaagagtcacagctgcctgaggagtccaagtcagccagcaacaagtccccgctggtgctggaagcaaacagggcccctgcagcctctgagggcaaccacacagatggtgcagaggaggcggctggttcatgcgcacaagccccatcccacagccctcccaacaaacccaagctagtggtgaagcctccaggcagcagcctcaatggggttcaccccaaccccactcccattgtccagcggctgccggcctttctagacaatcacaattatgccaagtcccccatgcaggaggaagaagacctggcggcaggtgtgggccgcagccgagttccagtccgcccaccccagcagtactcagatgatgaggatgactatgaggatgacgaggaggatgacgtgcagaacaccaactctgcccttaggtataaggggaagggaacagggaagccaggggcattgagcggttctgctgatgggcaactgtcagtgctgcagcccaacaccatcaacgtcttggctgagaagctcaaagagtcccagaaggacctctcaattcctctgtccatcaagactagcagcggggctgggagtccggctgtggcagtgcccacacactcgcagccctcacccacccccagcaatgagagtacagacacggcctctgagatcggcagtgctttcaactcgccactgcgctcgcctatccgctcagccaacccgacgcggccctccagccctgtcacctcccacatctccaaggtgctttttggagaggatgacagcctgctgcgtgttgactgcatacgctacaaccgtgctgtccgtgatctgggtcctgtcatcagcacaggcctgctgcacctggctgaggatggggtgctgagtcccctggcgctgacagagggtgggaagggttcctcgccctccatcagaccaatccaaggcagccaggggtccagcagcccagtggagaaggaggtcgtggaagccacggacagcagagagaagacggggatggtgaggcctggcgagcccttgagtggggagaaatactcacccaaggagctgctggcactgctgaagtgtgtggaggctgagattgcaaactatgaggcgtgcctcaaggaggaggtagagaagaggaagaagttcaagattgatgaccagagaaggacccacaactacgatgagttcatctgcacctttatctccatgctggctcaggaaggcatgctggccaacctagtggagcagaacatctccgtgcggcggcgccaaggggtcagcatcggccggctccacaagcagcggaagcctgaccggcggaaacgctctcgcccctacaaggccaagcgccagtgaggactgctggccctgactctgcagcccactcttgccgtgtggccctcaccagggtccttccctgccccacttccccttttcccagtattactgaatagtcccagctggagagtccaggccctgggaatgggaggaaccaggccacattccttccatcgtgccctgaggcctgacacggcagatcagccccatagtgctcaggaggcagcatctggagttggggcacagcgaggtactgcagcttcctccacagccggctgtggagcagcaggacctggcccttctgcctgggcagcagaatatatattttacctatcagagacatctatttttctgggctccaacccaacatgccaccatgttgacataagttcctacctgactatgctttctctcctaggagctgtcctggtgggcccaggtccttgtatcatnccacggtcccaactacagggtcctagctgggggcctgggtgggccctgggctctgggccctgctgctctagccccagccaccagcctgtccctgttgtaaggaagccaggtcttctctcttcattcctcttaggagagtgccaaactcagggacccagcactgggctgggttgggagtagggtgtcccagtggggttggggtgagcaggctgctgggatcccatggcctgagcagagcatgtgggaactgttcagtggcctgtgaactgtcttccttgttctagccaggctgttcaagactgctctccatagcaaggttctagggctcttcgccttcagtgttgtggccctagctatgggcctaaattgggctctaggtctctgtccctggcgcttgaggctcagaagagcctctgtccagcccctcagtattaccatgtctccctctcaggggtagcagagacagggttgcttataggaagctggcaccactcagctcttcctgctactccagtttcctcagcctctgcaaggcactcagggtgggggacagcaggatcaagacaacccgttggagcccctgtgttccagaggacctgatgccaaggggtaatgggcccagcagtgcctctggagcccaggccccaacacagccccatggcctctnccagatggctttgnaaaaggtgatccaancaggcccctttatctgtacatagtgactgagtggggggtgctggcaagtgtggcanctncctctgggctgagcacagcttgacccctctagcccctgtaaanactggatcaatgaatgaataaaactctcctaagnatctcctgagaaaaaaaaaaaaaaaaagg

SEQ ID NO: 365 - DNA, 3920 bp, Homo sapiens
ttttgtgtttcccgcacagtcaatcaaaataggaaaaaaaaatccccggaccgctccggccgtgtccgccgccgcttcccgcatcctctcccgccgccgccgccttcgctcctcaccatgtgtaaggcggcggggagccccgcctgaggtgccctaaacacactatgaccgctcccgaaaagcccgtgaaacaagaggaaatggctgccttggacgtggatagcggcggcggcggtggcggcggcggcggccacggcgagtatctgcagcagcagcaacagcacggaaacggtgcggtggcggcggcagcggcggcccaggacactcagccgtcaccgctcgctctgctggccgctacctgcagcaagatagggccgccatcgccgggcgacgacgaggaggaggcggccgccgcagccggggcccccgccgccgccggagcgacaggtgatttggcttctgcacagttaggaggagcaccaaaccgatgggaggttttgtcagccacacctacaactataaaagatgaagctggtaatctagtccagattccaagtgctgctacttcaagtgggcagtatgttcttccccttcagaatttgcagaatcaacaaatattttccgttgcaccaggatcagattcatcaaatggtacagtgtccagtgttcaatatcaagtgataccacagatccagtcagcagatggtcagcaggttcaaattggtttcacaggctcttcagataatgggggtataaatcaagaaagcagtcaaattcagatcattcctggctctaatcaaaccttacttgcctctggaacaccttctgctaacatccagaatctcataccacagactggtcaagtccaggttcagggagttgcaattggtggttcatcttttcctggtcaaacccaagtagttgctaatgtgcctcttggtctgccaggaaatattacgtttgtaccaatcaatagtgtcgatctagattctttgggactctcgggcagttctcagacaatgactgcaggcattaatgccgacggacatttgataaacacaggacaagctatggatagttcagacaattcagaaaggactggtgagcgggtttctcctgatattaatgaaactaatactgatacagatttatttgtgccaacatcctcttcatcacagttgcctgttacgatagatagtacaggtatattacaacaaaacacaaatagcttgactacatctagtgggcaggttcattcttcagatcttcagggaaattatatccagtcgcctgtttctgaagagacacaggcacagaatattcaggtttctacagcacagcctgttgtacagcatctacaacttcaagagtctcagcagccaaccagtcaagcccaaattgtgcaaggtattacaccacagacaatccatggtgtgcaagccagtggtcaaaatatatcacaacaggctttgcaaaatcttcagttgcagctgaatcctggaacctttttaattcaggcacagacagtgaccccttctggacaggtaacttggcaaacgtttcaagtacaaggggtccagaacttgcagaatttgcaaatacagaatactgctgcccaacaaataactttgacgcctgttcaaaccctcacacttggtcaagttgcggcaggtggagccttcacttcaactccagttagtctaagcactggtcagttgccaaatctacaaacagttacagtgaactctatagattctgctggtatacagctacatccaggagagaatgctgacagtcctgcagatattaggatcaaggaagaagaacctgatcctgaagagtggcagctcagtggtgattctaccttgaataccaatgacctaacacacttaagagtacaggtggtagatgaagaaggggaccaacaacatcaagaaggaaaaagacttcggagggtagcttgcacctgtcccaactgtaaagaaggtggtggaagaggtaccaatcttgggaaaaagaagcaacacatttgtcatataccaggatgtggtaaagtctatgggaagacctcacatctgagagctcatctgcgttggcattctggagaacgcccttttgtttgtaactggatgtactgtggtaaaagatttactcgaagtgatgaattacagaggcacagaagaacacatacaggtgagaagaaatttgtttgtccagaatgttcaaaacgctttatgagaagtgaccaccttgccaaacatattaaaacacaccagaataaaaaaggtattcactctagcagtacagtgctggcatctgtggaagctgcgcgagatgatactttgattactgcaggaggaacaacgcttatccttgcaaatattcaacaaggttctgtttcagggataggaactgttaatacttccgccaccagcaatcaagatatccttaccaacactgaaatacctttacagcttgtcacagtttctggaaatgagacaatggagtaaatattacacaaatacttattcattgtggttatttttatacagtagtgagaagaatattgttcctaagttcttagatatctttttattgatgtgcaaaaatttttggattgacagtaacttggttatacatgacactgaaatgccttactttgtatgatattccatagtatattaaaaatggtaaaattgcatgggttttgtaggtacttttggaatctagaagaaatgaaattttaccaagttatataaagagaaaattgaatttaacaatgcgaatggtagtctaaccaaatgcatcaatcctgtgtggtttagtgtaaaaatgagaacatgttggtatttatctattgtaagataaaaaagctggtgggtgaaagaaatcatgttatgataaaaaattttgtaattttcttgatgactggaatttttattatgcataactgacaaatcaagtttccaagcaaatgttacatagtgtaggctttacttagcttatcaatttgtcattttgaagctaattattttaattaggttaactatgtacaatattttaagcattactcttgtaagattttgaaaactacattttaacatggaactctagggatagtcaccttttaaatcctgttgaaaagccatgtttaagatttaatttgccaaaataatgtcttgttaatattctttcaataacgaagttgggcaatataaccaatgtttaaaaaagtttaaaatgtataagttgaggcatttgggtggtaagagaatgttatagtgaattatcccttttcttgactattggaggaccaaaaaaataaggtgtattgcgtcttagcagtgatttttatccaatcttgtttccaaaaaccatgtctcccagggccttaaaagccatcatgtaaattaccagtaaagtgtaacatatgcaaacataacaaaatcacttccatagtgacgatactccaaccatatggatattagtcatagaagaactagaggttttatgatatttttttaagtcttttttttttttgtctaggtagtcagtctgcacttaaatatcaatcattttccttttttgcttcttcccttaaaatttatatgtatccagtacatttaattgagaagcgtatgttttttattatgctgtattttctttttattttttaattattgtttatattttcaattcaaaaatgtacaaaataaagttacattgctggtcttgtaagagctatacagttttcctaaatgtatacctgtaactgcagcagttcacctatttcaaaaatttggaattctgttcatttgttattcttaagaccacctcaaatttaaaggctaccttattgtacgtttaaagtgtattataacagtgtggtagttaataaaacactatttttttttcttttg

SEQ ID NO: 366 - DNA, 3397 bp, Homo sapiens
gaattcaggttctgactatgtgaccatggacaagttatatagcctccctaacatctcagtttttccccttgtgtaaactgggggtactaattactactttacacaggttctgtgagaactaattgagatggcaaatgtaaaatgccaagtgctaagcatggacgcagtatatgatatctgctgccattttagcgggttgcacttaatgttcctgcccttaggtgctggggccctaaatccatgcactggtcctatgcattgatcaaggtggctgaggagagtgaaagcatttggaagagtggagagatgacaatgagagtcacttcccatttgtatgtcctgggcagggcatacttagctgcatgagacccagaccactttccaggggctcagataggtaggcatcaccatataacaccaatataacaccaataacacacatatgctggtaactaacagaatacaagaagcatatctggagcaaggagcttcaagggtcctagagaggaaatatttagtttagcagtcttcccggaggaagaggtttttaaggtgagtctcaaaaaatttacacacgggagaagttggagaaaatactggtcaaaaagtcactcatgtcataaagaactttggattccaggccaaggaatttttccttaattcagtctggaatgagggagatattgtattgcaaagtggctataagacaggaactagtctgaaaggtgcccaggtatactgggccaacaaatagtggtttagaaaccctactaactggttggcactgccatcgaaatttatctggtgcttttagaagatgacatttggagagagatatgcctagtacagttttaatgccaaattaattatgtgttttctaacacatttccaaaaaccagtgccaaggtggttgggttcattattgtgaacctcactgtattaccttatcattgcctatgaattagaaataaaatgcactgtacttgactgttggtggtacctacacaagtcaggaaattgaatagacctaaacacaggcacgtaggaataggtaaagtaagactgaggaaatctgaataagatgggtggatcgtatcaatgtcaatatcccaattgtgatactgtattagagttttggaaagacattaccagtggggagaactgggcaaagtgaacaaacgatttattattattttttacaactgcctgttactccgattacttcaagagttgaaattaaaaatgtattaataagactgggtgcagtggctcacttttgtaattccagcacttcaggaagccgaggcaggaggacagcttgagcccgggcgtctgagaccagcctgggcagcatggtgaaactgcatctctacaaaaaaattttagaaattagctaggcgtggtggtgcgtgcctgtagttccagctattcgggaggctgaaaagggaggatggcttgattccagggagtcgaggctgcagcgagcccagatcgcaccattgcattctagcctaggtgacagagcaagatcctgtctccaaaaataaaataaaaaaaaaaattaaaaaaaaggaaaacaatgtattagtaaaagttatgttttgtagaaatgtgttgcactcagtcacagtctagtctcctcagttacccatatatagggatatagggattcctcgggcacaaaatatgttgttatttaatcctgaggcctcagctggaaaagagagccaagtgcctagaacgaatgaggtccactgtgcgggaactgctttgcagtttgttaaataattataacaatcacccgaaactttagacggttctgtccccagtgggtcgattttacccgttttctgatttaccgactgcgtctatgtcacttttgcgtcactacctccaatggcagggttaaaatggatttctttaataatgaaatgaagtttctcaataatgaaagggctaacttaaagtcgccggatgcagcattttaaagtttaggaagttacttttgaaaagtacaaccggcagagatgagtgaacttagttttttaactgacttggagaagaccttgctagcagggcaggtttattacgaactctgtaattatccttctttgctaagctaaaggttttcctttcccaaccgtaagacagatttcgacttgagtgagagctgtgaacttttataaaagtgaaagggaagagaagaaatggcaggctgggaatctggcccggagacggcgtccaccgcgctcgagagcaacaatctgcatcaccagaaaggcaacttctctaccctacacttgcagacttccgcgagtccgggagcactcaacgcagtcacccgcgcttccgcgtcccggactagggaaactgaggcacggtaggcgcgtcgcgcgcaactcccgcctcggcgcctgccccctggaaggaacccaggcttccagagttcttcgcgcgagccagggacttccaagccgcgcacgtcccgtccgccccgccccgccccgccccggctcgggacaaagcccggagcccgcgccggagacggagggcggctcccgcgcgagccacgctcccccgtgggcgcgagactccgcccagctgccgaaagcccgcgccccaacggcgaagcagccgcgccggtccgccccgattccccatgacgtcaccggcggcggcaggcccgcctccagccccgggcggcaggccgcatgacgtcaccgaggccccacccctccggagcgagttcggtcctggcgttcatttcattcctgtcctcattccgaacattcttagcatcgctcgcgccgcgccgcgccgcctgagccgagccgagcctctgctgccgccgccgcggccccgccgcccgccgcgggcgcccaccaagcactttgcagactcgcttccacctgcgggccattcgcgcggcggggcccgggcccggggcggcgcgtccaggcacaggccatgcagtgacgcccccccacccctccacctttgcccggacggcgggcagcagcccagcgcgccagccggccccggggcaggagcggtgctaggcaggggtggggtggccgggcccagggaccgggagccggggagggagccgggcaccgagcagagggcgggggaagcggcgccgaagtttgcctcggactcgccgggcgctgcggtggctccctgggccgaggactgttgctgccgctgccgccgccgcttcattgcacattcaagtggaaaattttcaggagtcagcagaaacattgtgtccaaaaaagactgagtcgcagttaccaccaaacccaggaggagactctccctggaaaacttcccttccctttcggtttattttcttgaaaaggctccaggcttcggcttggaaaatcccaccgccaaa

SEQ ID NO: 367 - DNA, 2046 bp, Homo sapiens
ggagcccggggcgggcgagggcgggggtgtcccggctataaagcgtggccgcctcccgcggcgctcgggacagccgtaccccgggcggtcggacgggcgggcgccggtgggagctcgggccgtgcccgctgagagatccagagcgctccgttcccccggggccggagcgggggcgggtgggggcgtaagcccgggggatgctgggctcagtgaagatggaggcccatgacctggccgagtggagctactacccggaggcgggcgaggtctactcgccggtgaccccagtgcccaccatggcccccctcaactcctacatgaccctgaatcctctaagctctccctatccccctggggggctccctgcctccccactgccctcaggacccctggcacccccagcacctgcagcccccctggggcccactttcccaggcctgggtgtcagcggtggcagcagcagctccgggtacggggccccgggtcctgggctggtgcacgggaaggagatgccgaaggggtatcggcggcccctggcacacgccaagccaccgtattcctatatctcactcatcaccatggccatccagcaggcgccgggcaagatgctgaccttgagtgaaatctaccagtggatcatggacctcttcccttactaccgggagaatcagcagcgctggcagaactccattcgccactcgctgtctttcaacgactgcttcgtcaaggtggcgcgttccccagacaagcctggcaagggctcctactgggccctacaccccagctcagggaacatgtttgagaatggctgctacctgcgccgccagaaacgcttcaagctggaggagaaggtgaaaaaagggggcagcggggctgccaccaccaccaggaacgggacagggtctgctgcctcgaccaccacccccgcggccacagtcacctccccgccccagcccccgcctccagcccctgagcctgaggcccagggcggggaagatgtgggggctctggactgtggctcacccgcttcctccacaccctatttcactggcctggagctcccaggggagctgaagctggacgcgccctacaacttcaaccaccctttctccatcaacaacctaatgtcagaacagacaccagcacctcccaaactggacgtggggtttgggggctacggggctgaaggtggggagcctggagtctactaccagggcctctattcccgctctttgcttaatgcatcctagcaggggttgggaacatggtggtgggtatggctggagctcacaccacgaagctcttggggcctgatccttctggtgacacttcacttgtcccattggttaacatctgggtgggtctattacttactgtgatgactgctgtctcagtgggcatggtgttgatccacggggtactgtgataaccaccatggatacattttggtggcccactgggtactgtgaggactgctacattgatggatgttattggctaatccactgcatggtttgatggccaccatctcggttggccctttgggtgtgatggtgatagcatttcagtgacatcttctttggccccccccattaggtgctgtgcccacttcttttttggtgtacttggcacagtaggtgccaagttggccaccattctgtgtaacaccttttttggcccattgggtgctttgatggacatcatactgggtaggtgacaacgtcagtgggccaccatgtgccatgatggctgctgcagccccgtgttggccatgtcgtcaccattctctctggcatgggttgggtaggggatggaggtgagaatactccttggttttctctgaagcccaccctttcccccaactctggtccaggagaaaccagaaaaggctggttagggtgtggggaatttctactgaagtctgattctttcccgggaagcggggtactggctgtgtttaatcattaaaggtaccgtgtccgcctcttaaaaaaaaaaaaaaaaaaaaaaaaaaaaaaaaaaaaaaaaaaaaaaaaaaaaaaaaaa

SEQ ID NO: 368 - DNA, 2653 bp, Homo sapiens
acttaacatacaaactgctttctggttaatcatctttagaagactggatttctggatatctactccactccatctctattgacttttaaaacatgataatgcaaacctataacactggcaaccatcagtgaacctttaatttcattgattaatagcgtttgaagcttcctcagggaataacaatgacatcagcagtggttgacagtggaggtactattttggagctttccagcaatggagtagaaaatcaagaggaaagtgaaaaggtttctgaatatccagcagtgattgtggagccagttccaagtgccagattagagcagggctatgcagcccaggttctggtttatgatgatgagacttatatgatgcaagatgtggcagaagaacaagaagttgagaccgagaatgtggaaacagtggaagcatcagttcacagcagtaatgcacactgtacagataagacaattgaagctgctgaagccctgcttcatatggaatctcctacctgcttgagggattcaagaagtcctgaattcatccatgctgctatgaggccagatgtcattacagaaactgtagtggaggtgtcaactgaagagtctgaacccatggatacctctcctattccaacatcaccagatagccatgaaccaatgaaaaagaaaaaagttggccgtaaaccaaagacccagcaatcaccaatttccaatgggtctcctgagttaggtataaagaagaaaccaagagaaggaaaaggaaacacaacctatttgtgggagtttcttttagatctacttcaagataaaaatacttgtcccaggtatattaaatggactcagagagaaaaaggcatattcaagctggtggattcaaaggctgtctctaagctttggggaaagcataagaacaaaccagacatgaactatgaaaccatgggacgagctttgagatactactaccaaaggggaattcttgcaaaggttgaaggacagaggcttgtatatcagttcaaggatatgccgaaaaacatagtggtcatagatgatgacaaaagtgaaacctgtaatgaagatttagcaggaactactgatgaaaaatcattagaacgagtgtcactgtctgcagaaagtctcctgaaagcagcatcctctgttcgcagtggaaaaaattcatcccctataaactgctccagagcagagaagggtgtagctagagttgtgaatatcacttcccctgggcacgatgcttcatccaggtctcctactaccactgcatctgtgtcagcaacagcagctccaaggacagttcgtgtggcaatgcaggtacctgttgtaatgacatcattgggtcagaaaatttcaactgtggcagttcagtcagttaatgcaggtgcaccattaataaccagcactagtccaacaacagcgacctctccaaaggtagtcattcagacaatccctactgtgatgccagcttctactgaaaatggagacaaaatcaccatgcagcctgccaaaattattaccatcccagctacacagcttgcacagtgtcaactgcagacaaagtcaaatctgactggatcaggaagcattaacattgttggaaccccattggctgtgagagcacttacccctgtttcaatagcccatggtacacctgtaatgagactatcaatgcctactcagcaggcatctggccagactcctcctcgagttatcagtgcagtcataaaggggccagaggttaaatcggaagcagtggcaaaaaagcaagaacatgatgtgaaaactttgcagctagtagaagaaaaaccagcagatggaaataagacagtgacccacgtagtggttgtcagtgcgccttcagctattgcccttcctgtaactatgaaaacagaaggactagtgacatgtgagaaataaaatagcagctccaccatggacttcaggctgttagtggcagtactgacataaacatttgcaagggaagtcatcaagaaaagtcaaagaagactttaaaacatttttaatgcatatacaaaaacaatcagacttactggaaataaattacctatcccatgtttcagtgggaaatgaactacatattgagatgctgacagaaaactgcctcttacagtaggaaacaactgaacccatcaataagaaaaaggatcgaaagggaccaagcagctcactacgatatcaagttacactaagacttggaacactaacattctgtaagaggttatatagttttcagtgggaggggttgggatgggtaatctcattgttacatatagcaatttttgatgcattttatatgcataccagcaattattactgtgttcgcacagttctcacttaactggtgctatgtgaagactctgctaatataggtattttagaatgtgaattgaagaatggatcccaaaaacttcagaaagaggatagcaaaaaaagatctagtgcgattttatatatatatatatatatatatacatacatatatatatatcatatagcttaagctgatttaaaacaaaggccttagactaattttcgattttctttcttgaaataagctaatggcttgtttgtgtaaagcttttttattaaaagaaaaattttaaaaaaaaaaaaaaaaaaaa

SEQ ID NO: 369 - DNA, 10171 bp, Homo sapiens
ccagaggaccctttgccaccagagtgagatcctagagaccatcatcctggtaaatcccagtgcagacagcatcagctctgaggttcatcatcttcttagcagctcatcagcttataaactactaatcttgagtgggcaaagtttagagcctgggggagacctcatcctacagagtggcacctactcatatgaaaactttgcccaggtccttcacaaccccgagatttcccaattgctcagcaatagagaccctgggatacaggccttccttaccgtgtcctgcttaggggaaggtgattggagccacctgggattatccagttcccaagagaccctgcacctccggctaaaccctgagcccactctgcccaccatggacggcgtggctgagttctccgagtatgtctctgagactgtggacgtgccatccccatttgacctactagagccccccacctcagggggcttcctcaagctctccaagccttgttgctacatcttcccaggtggtcgtggggactctgccctctttgctgtcaatggtttcaacatcctggtggatggtggctctgatcgcaagtcctgtttttggaagctggtacggcacttggaccgcattgactcggtgctactcacacacattggggcagacaacctgccaggcatcaatggactactgcagcgcaaagtggcagagctagaggaggagcagtcccagggctctagcagttacagcgactgggtgaagaaccttatctctcctgagcttggagttgtctttttcaacgtgcctgagaagctgcggcttcctgatgcctcccggaaagccaagcgtagcattgaggaggcctgcctcactctgcagcacttaaaccgcctgggcatccaggctgagcctctatatcgtgtggtcagcaataccattgagccactgaccctcttccacaaaatgggtgtgggccggctggacatgtatgtcctcaaccctgtcaaggacagcaaggagatgcagttcctcatgcaaaagtgggcaggcaatagtaaagccaagacaggcatcgtgctgcccaatgggaaggaggctgagatctccgtgccctaccttacctctatcactgctctggtggtctggctaccagccaatcccactgagaagattgtgcgtgtgctttttccaggaaatgctccccaaaacaagatcttggagggcctagaaaagcttcggcatctggacttcctgcgttaccctgtggccacgcagaaggacctggcttctggggctgtgcctaccaacctcaagcccagcaaaatcaaacagcgggctgatagcaaggagagcctcaaagccactaccaagacggccgtgagcaagttggccaaacgggaggaggtggtagaagagggagccaaggaggcacgttcagagctggccaaggagttagccaagacagagaagaaggcaaaagagtcatctgagaagcccccagagaagcctgccaagcctgagagggtgaagacagagtcaagtgaggcactgaaggcagagaagcgaaagctgatcaaagacaaggtagggaaaaagcaccttaaagaaaagatatcaaagctggaagaaaaaaaagacaaggagaaaaaagagatcaaaaaggagaggaaagagctcaagaaggatgaaggaaggaaggaggagaagaaggatgccaagaaggaggagaagaggaaagataccaaacctgagctcaagaagatttccaagccagacctaaagccctttactcctgaggtacgtaagaccctctataaagccaaggtccctggaagagtcaaaatagacaggagccgtgctatccgtggggagaaggagctgtcttctgagccccagacacccccagcccagaagggaactgtaccactcccaaccatcagtgggcacagggagctggtcctatcctcaccagaggacctcacacaggactttgaggagatgaagcgtgaggagagggctttgctggctgaacaaagggacacaggactaggagataagccattccctctagacactgcagaggagggacccccaagtacagctatccagggaacaccaccctctgttccagggctgggacaagaagaacatgtgatgaaggagaaagagcttgtcccagaggtccctgaggaacaaggcagcaaggacagaggcctagactctggggctgaaacagaggaagagaaagatacctgggaggaaaagaagcagagggaagcagagaggctcccagacagaacagaagccagagaggaaagtgaacctgaagtaaaggaggatgtgatagaaaaggctgagttagaagaaatggaggaggtacacccttcagatgaggaggaagaggacgcgacaaaagctgagggtttttaccaaaaacatatgcaggaacccttgaaggtaactccaaggagccgggaggcttttgggggtcgggaattgggactccagggcaaggcccctgagaaggagacctcgttattcctaagcagcctgaccacacctgcaggagccactgagcatgtctcttacatccaggatgagacaatccctggctactcagagactgagcagaccatctcagatgaggagatccatgatgagccggaggagcgcccagctccacccagatttcatacaagtacatatgacctgcccgggcctgaaggtgctggcccattcgaagccagccaacctgccgatagtgctgttcctgctacctctggcaaagtctatggaacgccagagactgaactcacctaccccactaacatagtggctgcccctttggctgaagaggaacatgtgtcctcggccacttcaatcactgagtgtgacaaactttcttcctttgccacatcagtggctgaggaccaatctgtggcctcacttacagctccccagacagaggagacaggcaagagctccctgctgcttgacacagtcacaagcatcccttcctcccgtactgaagctacgcagggcttggactatgtgccatcagctggtaccatctcacccacctcctcactggaagaagacaagggcttcaaatcaccaccctgtgaggacttctctgtgactggggagtcagagaagagaggagagatcatagggaaaggcttgtctggagagagagctgtggaagaggaagaggaggagacagcaaacgtagagatgtctgagaaactttgcagtcaatatggaactccagtgtttagtgcccctgggcatgccctacatccaggagaaccagcccttggagaagcagaggagcggtgccttagcccagatgacagcacagtgaagatggcttctcctccaccatctggcccacccagtgccacccacacaccctttcatcagtccccagtggaagaaaagtctgagccccaagactttcaggaggcagactcctggggagacactaagcgcacaccaggtgtgggcaaagaagatgctgctgaggagacagtcaagccagggcctgaagagggcacactagagaaggaagagaaagttcctcctcccaggagcccccaggcccaggaagcacctgtcaacattgatgaggggcttacaggctgtaccattcaactgttgccagcacaggataaagcaatagtctttgagattatggaggcaggagagcccacaggcccaattctgggagcagaagcccttcccggaggtttgaggactttaccccaagaacctggcaaacctcagaaagatgaggtgctcagatatcctgaccgaagcctctctcctgaagatgcagaatccctctctgtcctcagcgtgccctccccagacactgccaaccaagagcctacccccaagtctccctgtggcctgacagaacagtacctacacaaagaccgttggccagaggtatctccagaagacacccagtcactttctctgtcagaagagagtcccagcaaggagacctccctggatgtctcttctaagcagctctctccagaaagccttggcaccctccagtttggggaactaaaccttgggaaggaagaaatggggcatctgatgcaggccgaggatacctctcaccacacagctcccatgtctgttccagagccccatgcagccacagcgtcacctcccacagatgggacaactcgatactctgcacagacagacatcacagatgacagccttgacaggaagtcacctgccagctcattctctcactctacaccttcaggaaatgggaagtacttacctggggcgatcacaagccctgatgaacacattctgacacctgatagctccttctccaagagtcctgagtctttgccaggccctgccttggaggacattgccataaagtgggaagataaagttccagggttgaaagacagaacctcagaacagaagaaggaacctgagccaaaggatgaagttttacagcagaaagacaaaactctggagcacaaggaggtggtagagccgaaggatacagccatctatcagaaagatgaggctctgcatgtaaagaatgaggctgtgaaacagcaggataaggctttagaacaaaagggcagagacttagagcaaaaagacacagccctagaacagaaggacaaggccctggaaccaaaagacaaagacttagaagaaaaagacaaggccctggaacagaaggataagattccagaagagaaagacaaagccttagaacaaaaggatacagccctggaacagaaggacaaggccctggaaccaaaagataaagacttggaacaaaaggacagggtcctagaacagaaggagaagatcccagaagagaaagacaaagccttagatcaaaaagtcagaagtgttgaacataaggctccggaggacacggtcgctgaaatgaaggacagagacctagaacagacagacaaagcccctgaacagaaacaccaggcccaggaacaaaaggataaagtctcagaaaagaaggatcaggccttagaacaaaaatactgggctttgggacagaaggatgaagccctggaacaaaacattcaggctctggaagagaaccaccaaactcaggagcaggagagcctagtgcaggaggataaaaccaggaaaccaaagatgctagaggaaaaatccccagaaaaggtcaaggccatggaagagaagttagaagctcttctggagaagaccaaagctctgggcctggaagagagcctagtgcaggagggcagggccagagagcaggaagaaaagtactggagggggcaggatgtggtccaggagtggcaagaaacatctcctaccagagaggagccggctggagaacagaaagagcttgccccggcatgggaggacacatctcctgagcaggacaataggtattggaggggcagagaggatgtggccttggaacaggacacatactggagggagctaagctgtgagcggaaggtctggttccctcacgagctggatggccagggggcccgcccacactacactgaggaacgggaaagcactttcctagatgagggcccagatgatgagcaagaagtacccctgcgggaacacgcaacccggagcccctgggcctcagacttcaaggatttccaggaatcctcaccacagaaggggctagaggtggagcgctggcttgctgaatcaccagttgggttgccaccagaggaagaggacaaactgacccgctctccctttgagatcatctcccctccagcttccccacctgagatggttggacaaagggttccttcagccccaggacaagagagtcctatcccagaccctaagctcatgccacacatgaagaatgaacccactactccctcatggctggctgacatcccaccctgggtgcccaaggacagacccctcccccctgcacccctctccccagctcctggtccccccacacctgccccggaatcccatactcctgcacccttctcttggggcacagccgagtatgacagtgtggtggctgcagtgcaggagggggcagctgagttggaaggtgggccatactcccccctggggaaggactaccgcaaggttgaaggggaaagggaagaagaaggtagggctgaggctcctgacaaaagctcacacagctcaaaggtaccagaggccagcaaaagccatgccaccacggagcctgagcagactgagccggagcagagagagcccacaccctatcctgatgagagaagctttcagtatgcagacatctatgagcagatgatgcttactgggcttggccctgcatgccccactagagagcctccacttggagcagctggggattggcccccatgcctctcaaccaaggaggcagctgccggccgaaacacatctgcagagaaggagctttcatctcctatctcacccaagagcctccagtctgacactccaaccttcagctatgcagccctggcaggacccactgtacccccaaggccagagccagggccaagtatggagcccagcctcaccccacctgcagttcccccccgtgctcctatcctgagcaaaggcccaagcccccctcttaatggtaacatcctgagctgcagcccagataggaggtccccatcccccaaggaatcaggccggagtcactgggatgacagcactagtgactcagaactggagaagggggctcgggaacagccagaaaaagaggcccaatccccaagtcctcctcaccccattcctatggggtcccccacattatggccagaaactgaggcacatgttagccctcccttggactcacacctggggcctgcccgacccagtctggacttccctgcttcagcctttggcttctcctcattgcagccagctcccccacagctgccctctccagctgaaccccgctcggcaccctgtggctcccttgccttctctggggatcgagctctggctctggctccaggaccccccaccagaacccggcatgatgaatacctggaagtgaccaaggcccccagcctggattcctcactgccccagctcccatcacccagttctcctggggcccctctcctctccaatctgccacgacctgcctcaccagccctgtctgagggctcctcctctgaggctaccacgcctgtgatttcaagtgtggcggagcgcttctctccaagccttgaggctgcagaacaggagtctggagagctggacccaggaatggaaccagctgcccacagcctctgggacctcactcctctgagcccagcacccccagcttcactggacttggccctagctccagctccaagcctgcctggagacatgggtgatggcatcctgccgtgccacctggagtgctcagaggcagccacggagaagccaagccccttccaggttccctctgaggattgtgcagccaatggcccaactgaaaccagccctaaccccccaggccctgccccagccaaggctgaaaatgaagaggctgcggcttgccctgcctgggaacgtggggcctggcctgaaggagctgagaggagctcccggcctgacacattgctctcccctgagcagccagtgtgtcctgcagggggctccgggggcccacccagcagtgcctctcctgaggtcgaagctgggccccagggatgtgccactgagcctcggccccatcgtggggagctctccccatccttcctgaacccacctctgcccccatccatagatgatagggacctctcaactgaggaagttcggctagtaggaagaggggggcggcgccgggtaggggggccagggaccactgggggcccatgccctgtgactgatgagacaccccctacatcagccagtgactcaggctcctcacagtcagattctgatgtcccgccagaaactgaggagtgtccgtccatcacagctgaggcagccctcgactcagatgaagatggagacttcctacctgtggacaaagctgggggtgtcagtggtactcaccaccccaggcctggccatgacccacctcctctcccacagccagacccccgcccatcccctccccgccctgatgtgtgcatggctgaccccgaggggctcagctcagagtctgggagagtagagaggctacgggagaaggaaaaggttcaggggcgagtagggcgcagggccccaggcaaggccaagccagcgtcccctgcacggcgtctggatcttcggggaaaacgctcacccacccctggtaaagggcctgcagatcgagcatcccgggccccacctcgaccacgcagcaccacaagccaggtcaccccagcagaggaaaaggatggacacagccccatgtccaaaggcctagtcaatggactcaaggcaggaccaatggccttgagttccaagggcagctctggtgcccctgtatatgtggatctcgcctacatcccgaatcattgcagtggcaagactgctgaccttgacttcttccgtcgagtgcgtgcatcctactatgtggtcagtgggaatgaccctgccaatggcgagccaagccgggctgtgctggatgccctgctggagggcaaggcccagtggggggagaatcttcaggtgaaggtgactctgatccctactcatgacacggaggtgactcgtgagtggtaccaacaaactcatgagcagcagcaacaactgaatgtcctggtcctggctagcagcagcaccgtggtgatgcaggatgagtccttccctgcctgcaagattgagttctgaaagagccgccctcccttccccaaggatccactcccccagctcctttagagaatggctactgctgagtcctttggggttgagggagatgggagctagggggaggggagggagatgtcttgttgtggggacttgggctgggctaaatgggaggggttgtccctccccatcatccattcctgtgaggtgtctcaaaccaaagttaacagggagaggatgggggaggggacaaattagaataggatagcatctgatgcctgagaaccctctcctagcactgtcaaatgctggtattgaatggggactgaggatgggtctcagagagcaacctcctccctcgtagagggagattatatccccaactccagggacctctttatctcaatctatttatttggcatcctgggagggatttccaatagtaatttatgtgacctggggcaggataccgtcagtgaggtgcccagagctgcaccctttcctccatttcccatcccccatctcctcaaccaccagggtctgagttctagcagggtcctgggggtatcccactgctatactgttctactgcttccctcagtatctgaatgtctcaatttaaaacttgaagctctttagaccaatagactggtgagaggagaaaggagcttatcccccagaccctgctttataccattcacatcccagggctgtgtccagacagcacaaaacggcaaggagagcccaagccccaatgccagaattcttccaaactccctgactctttgaagtttttactcaccccatttcaattatcctgatcccttctcatcccctgcttggcttctctgcatgtggtcatctgctgtggcttggtgtttaatgggttaaaaataagccactgcctgacatcccaacatttgacaccccagcaatgtgtgactcccccaacattccactatgccatcctgcagctgaaatgggaacactggctgcctctccaaacccgctcttggacagaggatctgggaggtggaagccaggccagaggacttggggaaaatgagatggaggaaggaaaaagggagaagctgagccacagcttaactcctacagagtgaaatgaaaacgggctgaaaataccaccccaggagaggacctcgccccaagcaagccagtgagcagccctgccagactactgccagactgagaaacccagaagctggtagtcatgtgggcttgccttctctgccaaacgactgggaaaccaaaatgagcccaccttgtgttcttcctagctccaccctccccgtgctgctgtgttctgctcctccccacgcttccctgctatagttcccagctgctgtaacggagccacctccaactctaacaataaaccaagtt

SEQ ID NO: 370 - DNA, 2726 bp, Homo sapiens
agccctacattctgctgctgctgcagagtgatgatttttaacagaccagaacttacacatctaaatgagtgttgttgttcagtgaagtcaccttaggacaatgatttaaataacaccgcgatttctcaagaagtttggaacttctcttatggttgagttcaaagccattttatgttatatgtggcccaaacaagttttattagtacaattaaatctttattgaggacttttgatggaccacatagtgaacttggactgggaatcaaaagaatggtaaggcagggtgtctgccttcactgtgcctgcagtctggctgagatgcacatgtgagccacactagcacaagccagcatgcactggcctgtcacaagagagtgcacaagggtctggatccctgaccctgatgaggtatggcgctcagctgagttaaccaaggactacaaagaaggagacaagagcctacagctcagactggaggatgaaacgattctggaatacccaattgatgtacaacgcaaccagctgcccttcttacggaatccagatatcttggtgggagaaaatgacctgactgcccttagctatcttcatgagcctgcagttttgcataatttgaaggtccgtttcctggagtccaaccatatctacacttactgtggtatcgtacttgttgccattaatccttatgaacagttgccaatctatggacaagatgtcatctatacctacagtggccaaaacatgggagacatggacccccacatctttgctgtggcagaagaagcctacaagcagatggccagagatgagaagaatcagtccatcatagtcagtggggagtctggagccgggaagacggtatcagccaagtatgccatgcgctatttcgccaccgttggtggctcggccagtgaaaccaacatcgaagagaaggtgctggcatccagtcccatcatggaggccattggaaatgccaagaccacccgcaatgacaacagcagccgttttggcaagtacatccagattggctttgacaaaaggtaccacatcatcggggccaacatgaggacttacctcttggagaagtccagagtggtcttccaggcagatgatgagaggaattaccacatcttttaccagctctgtgctgctgccggtcttccagaatttaaagagcttgcactaacaagtgcagaggactttttctatacatcacagggaggagacacttccatcgagggtgtggacgatgctgaggactttgagaagactcgacaagccttcacactcctcggagtgaaagagtcccatcagatgagcatttttaagataattgcttctatcttgcaccttggaagtgtggcgattcaggctgagcgtgatggtgattcctgtagtatatcaccccaggatgtatacctaagcaacttctgccgactgctaggggtggagcacagtcagatggagcactggctgtgtcatcgcaagctggtcaccacctcggagacctacgtcaagaccatgtccctgcagcaggtgatcaatgcgcgcaacgccctggcgaagcacatctatgcccagttgttcggctggattgtggagcacatcaacaaggccctgcacacctccctcaagcagcactccttcatcggggtcctggacatctatgggtttgagacatttgaggtaaacagctttgagcagttctgtatcaactatgcaaatgaaaagctccagcagcagttcaactcgcatgttttcaaactggagcaagaagaatacatgaaggaacagatcccttggaccctgattgatttttatgataaccaaccttgtatcgacctcattgaagccaagctgggtatcttggacctgttggatgaagaatgtaaggtccccaaaggaactgaccagaactgggctcagaagctctatgaccggcactccagcagccagcacttccagaagccccgcatgtccaacacggccttcatcatcgtccactttgcagacaaggtggagtacctctctgatggttttctggagaaaaacagagacacggtgtatgaagagcagatcaatatcctgaaggccagcaagttcccactagtggctgacttgtttcatgatgacaaggaccctgttcctgccaccacccctgggaaggggtcatcttcgaagatcagcgtccgttctgccagaccccccatgaaagtctccaacaaggagcacaagaaaaccgttggccaccagttccgtacctccctcagcacccagcagattgtcaaaattttaaacctttatactcccctgaatgaatttgaagaacgggtaacagtggcctttatacgaacaatccaggcacaactacaagagcggaatgaccctcagcaactgctattagatgccaagcacatgtttcctgttttgtttccatttaatccatcttctctaaccatggactcaatccacatcccagcgtgtctcaatctggaattcctcaatgaagtctgaagatgcatgtttccagcattagtttgattcccaatgtgagcaagaaggaagtatatacagtaaagtaaattcaaggatctgttaaatctggtaaaagtagatcaaatcagagattgacagcctgtggagggtgctgaactatacagaattagacacaactatgtcattattttttgtacctactgctcagaataaaaacacttgaaatatgg

SEQ ID NO: 371 - DNA, 6200 bp, Homo sapiens
ggtttttaggcctggccgccatggcgtctccttctagaaactcccagagccgacgccggtgcaaggagccgctccgatacagctacaaccccgaccagttccacaacatggacctcaggggcggcccccacgatggcgtcaccattccccgctccaccagcgacactgacctggtcacctcggacagccgctccacgctcatggtcagcagctcctactattccatcgggcactctcaggacctggtcatccactgggacataaaggaggaagtggacgctggggactggattggcatgtacctcattgatgaggtcttgtccgaaaactttctggactataaaaaccgtggagtcaatggttctcatcggggccagatcatctggaagatcgatgccagctcgtactttgtggaacctgaaactaagatctgcttcaaatactaccatggagtgagtggggccctgcgagcaaccacccccagtgtcacggtcaaaaactcggcagctcctatttttaaaagcattggtgctgatgagaccgtccaaggacaaggaagtcggaggctgatcagcttctctctctcagatttccaagccatggggttgaagaaagggatgtttttcaacccagacccttatctgaagatttccattcagcctgggaaacacagcatcttccccgccctccctcaccatggacaggagaggagatccaagatcataggcaacaccgtgaaccccatctggcaggccgagcaattcagttttgtgtccttgcccactgacgtgctggaaattgaggtgaaggacaagtttgccaagagccgccccatcatcaagcgcttcttgggaaagctgtcgatgcccgttcaaagactcctggagagacacgccataggggatagggtggtcagctacacacttggccgcaggcttccaacagatcatgtgagtggacagctgcaattccgatttgagatcacttcctccatccacccagatgatgaggagatttccctgagtaccgagcctgagtcagcccaaattcaggacagccccatgaacaacctgatggaaagcggcagtggggaacctcggtctgaggcaccagagtcctctgagagctggaagccagagcagctgggtgagggcagtgtccccgatcgtccagggaaccaaagcatagagctttccagaccagctgaggaagcagcagtcatcacggaggcaggagaccagggcatggtctctgtgggacctgaaggggctggggagctcctggcccaggtgcaaaaggacatccagcctgcccccagtgcagaagagctggccgagcagctggacctgggtgaggaggcatcagcactgctgctggaagacggtgaagccccagccagcaccaaggaggagcccttggaggaggaagcaacgacccagagccgggctggaagggaagaagaggagaaggagcaggaggaggagggagatgtgtccaccctggagcagggagagggcaggctgcagctgcgggcctcggtgaagagaaaaagcaggccctgctccttgcctgtgtccgagctggagacggtgatcgcgtcagcctgcggggaccccgagaccccgcggacacactacatccgcatccacaccctgctgcacagcatgccctccgcccagggcggcagcgcggcagaggaggaggacggcgcggaggaggagtccaccctcaaggactcctcggagaaggatgggctcagcgaggtggacacggtggccgctgacccgtctgccctggaagaggacagagaagagcccgagggggctactccaggcacggcgcaccctggccactccgggggccacttccccagcctggccaatggcgcggcccaggatggcgacacgcaccccagcaccgggagcgagagcgactccagccccaggcaaggcggggaccacagttgcgagggctgtgacgcgtcctgctgcagcccctcgtgctacagctcctcgtgctacagcacgtcctgctacagcagctcgtgctacagcgcctcgtgctacagcccctcctgctacaacggcaacaggttcgccagccacacgcgcttctcctccgtggacagcgccaagatctccgagagcacggtcttctcctcgcaagacgacgaggaggaggagaacagcgcgttcgagtcggtacccgactccatgcagagccctgagctggacccggagtccacgaacggcgctgggccgtggcaagacgagctggccgcccctagcgggcacgtggaaagaagcccggaaggtctggaatcccccgtggcaggtccaagcaatcggagagaaggtgaatgtcctatactccataattcccagccagtaagccagcttccttccctgaggcctgaacatcatcactacccaacaatcgatgagcctcttccaccaaactgggaagctcgaattgacagccacgggcgggtcttttatgtggaccacgtgaaccgcacaaccacctggcagcgtccgacggcagcagccaccccggatggcatgcggagatcggggtccatccagcagatggagcaactcaacaggcggtatcaaaacattcagcgaaccattgcaacagagaggtccgaagaagattctggcagccaaagctgcgagcaagccccagcaggaggaggcggaggtggagggagtgactcagaagccgaatcttcccagtccagcttagatctaaggagagaggggtcactttctccagtgaactcacaaaaaatcaccttgctgctgcagtccccagcggtcaagttcatcaccaaccccgagttcttcactgtgctacatgccaattatagtgcctaccgagtcttcaccagtagcacctgcttaaagcacatgattctgaaagtccgacgggatgctcgcaattttgaacgctaccagcacaaccgggacttggtgaatttcatcaacatgttcgcagacactcggctggaactgccccggggctgggagatcaaaacggaccagcagggaaagtcttttttcgtggaccacaacagtcgagctaccactttcattgacccccgaatccctcttcagaacggtcgtcttcccaatcatctaactcaccgacagcacctccagaggctccgaagttacagcgctggagaggcctcagaagtttctagaaacagaggagcctctttactggccaggccaggacacagcttagtagctgctattcgaagccaacatcaacatgagtcattgccactggcatataatgacaagattgtggcatttcttcgccagccaaacatttttgaaatgctgcaagagcgtcagccaagcttagcaagaaaccacacactcagggagaaaatccattacattcggactgagggtaatcacgggcttgagaagttgtcctgtgatgcggatctggtcattttgctgagtctctttgaagaagagattatgtcctacgtccccctgcaggctgccttccaccctgggtatagcttctctccccgctgttcaccctgttcttcacctcagaactccccaggtttacagagagccagtgcaagagccccttccccctaccgaagagactttgaggccaagctccgcaatttctacagaaaactggaagccaaaggatttggtcagggtccggggaaaattaagctcattattcgccgggatcatttgttggagggaaccttcaatcaggtgatggcctattcgcggaaagagctccagcgaaacaagctctacgtcacctttgttggagaggagggcctggactacagtggcccctcgcgggagttcttcttccttctgtctcaggagctcttcaacccttactatggactctttgagtactcggcaaatgatacttacacggtgcagatcagccccatgtccgcatttgtagaaaaccatcttgagtggttcaggtttagcggtcgcatcctgggtctggctctgatccatcagtaccttcttgacgctttcttcacgaggcccttctacaaggcactcctgagactgccctgtgatttgagtgacctggaatatttggatgaggaattccaccagagtttgcagtggatgaaggacaacaacatcacagacatcttagacctcactttcactgttaatgaagaggtttttggacaggtcacggaaagggagttgaagtctggaggagccaacacacaggtgacggagaaaaacaagaaggagtacatcgagcgcatggtgaagtggcgggtggagcgcggcgtggtacagcagaccgaggcgctggtgcgcggcttctacgaggttgtagactcgaggctggtgtccgtgtttgatgccagggagctggagctggtgatagctggcaccgcggaaatcgacctaaatgactggcggaataacactgagtaccggggaggttaccacgatgggcatcttgtgatccgctggttctgggctgcggtggagcgcttcaataatgagcagaggctgagattactgcagtttgtcacgggaacatccagcgtgccctacgaaggcttcgcagccctccgtgggagcaatgggcttcggcgcttctgcatagagaaatgggggaaaattacttctctccccagggcacacacatgcttcaaccgactggatcttccaccgtatccctcgtactccatgttgtatgaaaagctgttaacagcagtagaggaaaccagcacctttggacttgagtgaggacatggaacctcgcctgacattttcctggccagtgacatcacccttcctgggatgatccccttttccctttcccttaatcaactctcctttgattttggtattccatgatttttattttcaaaccaaatcaggattgacaaaagctgtgcatgaagaactgccttcttctaagatctaaccttcaggcttctctcctctgttttcaatgaactgctagcctgtatgcaatattaaaaaacagctgtctcaaggtctgtgtatatctccacatacctccattactaacaatgaaatatgaatgcaagttaagctacacttgaccaaatggtaataaatgtttacttccatttctatcattgaagggaaaatgtgagcattaagcactccaggctttcatatgcccatgtcttctgagcagagccaccattttttataatttctaataaccaactccagaactaggagctgatcaactctttgttttcctctccatctacttttccctgtgcataatatccatccaaaggacaacagtggcaaagctgaaatttttatacattcaactcatgattcacatgtggcatcagtcccatcagccggaactagcctagacatacggtgcaaatatgacacttctaacgattaacaacagcaagaaaacacctgctgctgatgcaatgcaatgcatcccaatggttgtggggattgtgggctcaactcaagagaagtttaggagggggagcatccctagtgaatactcacaccacaagaaggacaaacttgtgcacatgtccaagaaagaaagcttcttgattgaggtagcatgaaggatgaggcttcagcccccattgtcttatgtagaatgtggcaatgccaactggagaaagggaagaaggacatattaccttggtttgaatccctgagttctgtactgttctgttttgtttagtctagccacagttcttcacaaaggaaaaaaaaatgtgtagatgataccatgacttttgttaaagccatgacttttgtttgcttggcagacaaaccctttttttaaaactttgatatttttttttcacattttttttccttttcctttcttaatcatggagttcaagttcctttgcattcgattgtccatcgggaccacactaggaagctgcagagagtgatggtgcttgttagggatcaagggcaacatagtacttctccttcacccatagtaatcctcctggggcagaaacataacaccccaaaggcacgttgatttgtatcaaaataaatatccagtttcttttagcattcagtgaaaacatatctcagaaaacttcatgttgtcagaaaaacagctgcaggctccaaagacagcctaacctctcaactacatttgaaataaacccaaccataatggtaaaaaaaaaa

SEQ ID NO: 372 - DNA, 3753 bp, Homo sapiens
gcggcgggagaagatggtggcgctggaggcagcagcggctggagcggagctttattcccaggcttggcaccagcgctgtcactagcgccgcctgctcccgcgggcccgcggacccagctgtcaggcaagcccagtggagcaaaatgagagcgcagtgagccgggcccagcttctctcctagccgttccgactcccaccatgaaccacttggaggggtctgcggaggtggaggtgaccgacgaggcggcaggtggggaggtgaacgagtcggtggaggccgacctggagcaccccgaggtggaagaggaacagcagcagccgccgcagcagcagcactatgtgggccgccaccagcgcgggcgagccctcgaggacctccgcgcccagctcggccaggaggaagaggagcgcggggaatgcctggcgcgctcagccagcacggagagcggcttccacaaccacacggacaccgccgagggcgacgtgatcgccgcggcccgcgacggctacgatgcggagcgcgcgcaggaccccgaggacgagagcgcctatgctgtgcagtaccggcccgaggccgaggagtacacggagcaggcagaggccgagcacgccgaggccacgcaccgccgcgcgctgcccaaccacctgcacttccactcgctggagcacgaggaagccatgaatgcggcctactcaggctacgtctacacgcaccggctcttccaccgcggtgaggacgagccctactccgagccctatgccgactacggcggcctccaggagcacgtgtacgaggagataggggacgcgcccgagctgcacgcacgcgacggtctgcggctctacgagcaggagcgcgacgaggcggccgcgtaccgccaggaggccctgggcgcgcggctgcaccattacgacgagcgctccgacggcgagtccgacagccccgagaaggaggccgagttcgcgccctacccgcgcatggacagctacgagcaggaggaggacatcgaccagatagtggccgaggtgaagcagagcatgagctcgcagagcctcgacaaggcagccgaggacatgcctgaggccgagcaggacctggagcgtccccctaccccggccgggggtcgccccgacagccccgggctgcaggcgccggcggggcagcagcgggcggtgggccccgcgggcggcggcgaggcggggcagcggtacagcaaggagaagcgcgatgccatctcgctggccatcaaggacatcaaggaggccatcgaggaggtgaaaaccaggaccatccgttcgccttacacccccgacgagcccaaagagcccatctgggtcatgcgccaggacattagccccaccagggactgtgacgaccagaggccgatggacggagattctccgtctcctggcagctcctcccccttgggtgcagagtcatcaagcacatctcttcaccccagtgaccctgtggaagtgcccattaataaagagtcaagaaaaagcttggcttcattcccaacctacgttgaagttccgggaccctgcgaccccgaagacttgatcgatggaatcatttttgccgccaattaccttggctccactcagctgctctcagacaaaactccttccaaaaacgtgcgcatgatgcaggcccaggaagccgtaagcaggatcaagatggcccagaaattagccaaaagcaggaagaaggctcctgaaggcgaatctcagccaatgactgaagtggacctcttcattcttacccagagaatcaaagtgctgaacgccgacacacaggagacaatgatggaccaccctctgaggaccatttcctacattgcggacattgggaacatcgttgtgctgatggcccgccggcggatacctcgctccaactcccaggagaacgtggaagcgtcccacccatcccaggatgggaaaaggcagtacaagatgatctgccacgtcttcgagtctgaggatgctcagctgattgcacagtccatcggacaggcatttagcgtggcataccaggaattcctcagggccaatgggattaaccccgaagatctcagccagaaggagtatagtgacctgctcaatacccaggacatgtacaacgatgacctgatccacttctccaagtcggaaaactgtaaagatgttttcatagagaagcagaaaggagaaatcctaggtgtggtgattgtggagtctggctggggatccatcctccccaccgtgatcattgccaacatgatgcatggtggccctgcggagaaatctgggaagctgaatatcggtgaccagatcatgtccattaatggcaccagcctggtgggcctgcctctgtccacctgccagagcattattaagggcttagagaatcagtcccgagtcaagctgaatatcgtgagatgtcctccggtgaccaccgtgttaatcagaagaccagaccttcgctaccagctcggtttcagcgtccagaatggaattatctgcagcctcatgcgagggggaatagctgagagaggaggcgtccgtgtggggcaccggatcattgaaatcaatggacagagcgtcgtggccaccccccacgagaagatcgtccacattctctccaatgctgttggggagattcatatgaagacaatgccagccgcgatgtacaggctgctgacggcccaggagcagcctgtttacatctgaccgcggccacacgcggtggcatgcatggaggactctcctcttcgtggttgtgtttctcgtgctgcatccctgtgtccactgagactttcccctctcgcgcccagcatttggttttacacaggaagagaagaatccacaaggacctctttactctctccgatttgctttttttttttttttttttcaataccagggaagtttcgtatgcactcccttgaggatggagagcagccagcacccacctggtactgacccaggaccatcctggagggctttctgggtgtgtccagggggtgggctgtcactgcttgagggagaatcctcccttcccaggaggtgcagacttcttaaaaggagctcgcggggcagcaaagcagctgattcagcagtgcctaaaacccagttgctgatccctgctctctgagtttatctgtgggaatgtggtagtacccagggccagcccacgtcattaaggttatgcactgcctgccatgtagttggggcaccatacattatttcttcccagaatctctgagccaaccttaaacctcttctattgctagttctaatttcaacgtatgtgtgttttctaatacgagccttctcaccccaggataaaaggggaaataactgccttgggcaaggacaccatagtgtcacagagagcttggcaattcatggggcatctgaagctttaccaggttgtcctcaagttatcaaccattagataaacacaggcaggtactgtctgcttctctctctctcacacacacacacacacacacagtcccattcggatatcacccttccctgctcccaccaccagtgagacaagctgaagattaggcacacagatcccctggaaacccacctctctggaaggtcccttccctggcaggtggtcaggcaggcgggggctgttcagcctcatcctgagagacctgtcctctctgtgctgaggtccagcccctccagcaccactttggcttatcgtatcctcctcctggacttaccctctctgccgaacacacatcccaggcg

SEQ ID NO: 373 - DNA, 7181 bp, Homo sapiens
ggcttaagcaggtaaagcagtcactgtgaagaaaataacattttaagaaacttttctgtcacaattgatagaggaaaagccagtagagaagtacatcttcttgtgtgtgtgtctcatcgtgccactttttgtaactcagcttagtaatgaagccaccattatgtcctcagtcagtgaagtaaatgtggatataaaagatttcctaatgagcattaatttggagcagtatctcttacatttccatgagtctggttttactactgtgaaggactgtgcagcaataaatgacagcctgctgcagaaaattggaatatcacctacaggtcaccgtaggaggatacttaaacagttacagataatcttgtcaaaaatgcaagatattccaatatatgcaaatgttcataaaactaagaagaatgatgacccttcaaaggattaccatgttccatcttctgatcagaatatctgcatagaactttccaattctggtagtgttcagacatctagcccaccgcagttggagactgttagaaaaaatcttgaagacagtgatgcaagtgtggaaagaagccagtatcctcaatcagatgataagctgtctcctcctaaacgcgacttccccactgcagaggaaccacacctgaatttgggttctttgaacgattctttatttggtagtgacaatattaaaatagaatcattgattacaaagaagactgtggatcacacagttgaagaacaacaaacagaaaaagttaaattgatcacagaaaatctcagtaagctccctaatgcagactctgaatgcctttcttttgttggctgttcaacatcaggaataaattctggaaatggaacaaatggtttattagaaggatcaccaccatccccattctttaagtttcaaggagaaatgattgtaaatgacttgtatgttccatcatcaccaatcctagcacctgtgagaagtcgtagcaagttggtttcaagaccatctcgatcttttctgctaagacatcgacctgtaccagagattccagggtcaacaaaaggagtttctgggagctatttccgtgaaagaagaaatgttgctacctcaactgaaaaatctgtggcatggcaaaattcaaatgaggagaattcatcttccatctttccttatggagagacctttctcttccagagactagaaaattccaagaagcgatctataaagaatgaatttttgacccagggagaagcactcaaaggggaagcagctactgcaacaaactcttttatcatcaaatcaagcatatacgataacagaaaggagaaaataagcgaggacaaggtggaagatatttggatacctcgagaggacaaaaacaattttttgatagacactgcttctgaatcagaatactcaacagtagaagaatgctttcagagtttaagaagaaaaaattcaaaggcatctaaatctaggactcaaaaagccttgattttggactccgttaataggcacagttatccgttaagctcaacaagtggaaatgctgattcatcagccgtttcttcacaggcaatatctccctatgcctgcttttatggagcatctgcaaagaaggttaaatcaggatggctggataaactctctcctcaaggaaaacgcatgtttcaaaagagatgggtgaaatttgatggccttagcatttcttactacaataatgagaaggagatgtattcgaaaggaataattcccctttctgctgtatcaacagtacgagttcaaggagacaacaaatttgaagttgttacaacacaaagaacttttgtttttagagtagaaaaagaagaggagagaaatgactggatcagcatactattaaatgcactgaaatcacaatcccttacctcgcagtctcaagctgttgttacacctgagaaatgtggatatcttgaattgagaggctataaggcaaaaatttttactgtgttaagtggaaacagtgtgtggctttgcaaaaacgaacaggattttaagagtggacttggtattaccataattcctatgaatgtagcaaatgtaaagcaagtggaccgaactgtgaaacaatcttttgaaataatcactccctacaggagtttcagctttacagccgagactgaaaaggagaaacaagactggattgaagctgtgcagcaatcaatagcagaaactctctctgattatgaagtagctgagaagatttggttcaatgaatccaacaggagctgtgcagattgtaaagccccagatcctgactgggcatccatcaatctctgtgttgtcatctgtaagaagtgtgcaggacagcatagatctttaggaccaaaagattccaaggttagaagtctaaaaatggatgctagcatttggagcaatgaactcatcgagctttttattgtcattggaaacaaaagagcaaatgacttttgggctggtaatcttcaaaaggatgaagaattacatatggactcaccagtagaaaagagaaaaaactttattactcagaaatataaagaaggaaaattcagaaaaactcttttggcatctctcaccaaagaagaattaaataaggctctatgtgctgctgtagtgaaaccggatgttctagaaacaatggctttgctgttcagtggagcagatgtcatgtgtgccaccggagaccccgtgcatagcaccccctatctgctagccaagaaagctgggcaaagtctgcaaatggaatttctctaccataacaaattctcagatttccctcaacatgatattcattccgagggtgtattaagtcaagagtcttcccagtccacattcctctgtgactttttatatcaagctccttctgctgcttctaaactctcttcagagaaaaaactgcttgaagagacaaataaaaaatggtgtgttttggaaggaggcttcttgagttactatgaaaatgataagtctaccacacctaatggcaccattaatatcaatgaagttatctgcctggctatacacaaagaggacttctatttaaatactgggcccatctttatctttgagatctacttaccctccgaacgtgtgtttttatttggagctgaaacatctcaagctcaaagaaaatggacagaggcaatagccaagcattttgttcccttatttgctgaaaacttaacagaagctgactatgatttgattggtcaactcttctacaaagactgccatgccctggatcagtggagaaaaggctggtttgctatggacaaatccagcttgcatttttgccttcaaatgcaagaagttcagggagatagaatgcacttaagaagactgcaagagctaacaatcagcacaatggttcaaaatggggaaaaactggatgttttactcttggtagaaaaagggagaacattatacatccatgggcataccaagttggatttcacagtctggcatactgcaattgaaaaagcagcaggtacagatggtaatgctttacaagatcagcagctcagcaaaaatgacgttcccattatagtgaacagctgtatagcatttgttacacagtatggtttaggatgcaaatatatctatcaaaagaatggtgatcctttgcatataagtgaactcctggagagtttcaaaaaggatgcaagaagctttaaattgagggctggaaaacatcagcttgaagatgtgacggctgtgttgaaaagttttctctctgacattgatgatgcactgcttactaaggagctctacccatattggatctctgctttagatacgcaagatgacaaggaaagaattaaaaaatatggagcatttatacgttctcttccaggggtcaaccgagcaacactagcagctatcattgaacacctgtatagggttcagaaatgctcagaaatcaatcacatgaatgcccataatttggccttggtcttttcatcctgtttgtttcaaacgaagggacaaactagtgaagaagtgaatgtaattgaggacctaattaataattatgtagaaatatttgaggttaaagaagatcaagtcaaacaaatggacatagaaaatagctttattaccaagtggaaagacacccaagtttcccaggctggagatttgttaattgaagtatatgtagaaaggaaggaacccgactgtagtattataattcggatatctcctgtgatggaagcagaagaattaactaatgatatattagcgataaaaaatattattcctacaaaaggtgatatttgggccacatttgaagtcattgaaaatgaagagctagagcgtcctcttcactacaaggaaaatgtactggagcaggtgcttcggtggagttcattagctgaacctggctctgcttacctggtggtgaagagattcttaaccgctgacacaattaaacactgcagtgaccggagtacactgggaagcatcaaagaaggaatcttgaaaatcaaagaagaaccatccaaaatactatctggaaataagtttcaagaccggtattttgttttacgagatgggtttctctttctttacaaggatgtgaagagtagtaaacatgacaagatgttttctctcagttccatgaagttttatcgtggagtgaaaaagaaaatgaagcctccaacaagctggggattgaccgcatattctgagaaacatcactggcacctgtgttgtgatagttcacaaactcagacggagtggatgaccagtatctttattgcccagcatgaatatgatatatggccaccagctggaaaggaacgaaaacgttcaataaccaaaaatcccaaaattggaggtttgcctctgattcctatacagcatgaggggaatgcaaccttggcccggaaaaatattgagagtgcaagagcagaacttgaaaggctgcggctcagtgaaaagtgtgataaagagtccgtggactctagcttaaaggagagagcttccatggtggcccactgcctggagcacaaggacgataaacttcgaaatcgaccccgaaaacatcggagtttcaactgcctggaggacacagagcctgaagccccacttgggcaaccaaaaggccataaaggcctaaagacattgaggaagactgaggacaggaatagcaaagctactttggactctgatcataagttaccatcaagggtaattgaagaacttaatgtggttctacaacggtcaagaacccttccaaaagaattacaggatgagcagattttgaagtaggaaataaaatgaattgctccccagattatttttttaatattgtatgcaatctttatgtgtaactccaaaactgaactataagataattcataagaatttgcctattgataggcaaatttgtctatgcttaggcatttaaggagcatttaaaaatatgtatatatgtgactgaatgtaagattaactttattttggtctgaacaaaccttgtaaagttccattgtattaacgtgtgtaagaagacattgggttacttaggtggtcagtccttttaaagtagttgtctgttaagtggtataatttatgagcagaaatctcaaactgtactgtattgtataaaatgctgtgtttaaatgaagcctaagaaactatctgtaacatattttgcactttgagaaaccttgtatattaaattaccatatgtttttaggtttacagaagttctaccttagggaaaagaaagggaagtaaattgaaaaaggggggagaatttattgtagtggctgcctaaaaaccactggagtttttaaaagaagcaaggagttaaatgtcctgcaaaacaaggaagtgagctaagattcattctagttcactaatgaccagaacttgtcaatgagaaaccacttgttaagaaaaagtccagtgtttatttctcaagagtaatattcggccaacagatgtaaataatagcactagccactcttattaatatttatagtgttagaaaaccagccacattacagattcactacgtttgagctcattgttggtggctgctaagaggaaacttacactgcattggagaggttgtgtacacaggacctggcctggatgctgattgcactgtcattgtatgcaagcattttgtcttttttcagaatttctgactatacttttggtacgaacaaaattcatcaccacagggtcctgttgttttgtttgatttttagatttttttaaattattattaaggttgtaatgtttttctccgagttgtcagaaataactggaagaatacaatatatggccattatggagccaggggctagttggtggtttactatacatttgggggctacctggtcacatttaatctaggtttttttttctttttttaagtaaaggtgtggtctcttccctgtacttatgaataaggacaaagccctatttttgtttccacataaagatcagctactgaattggtgaatttcctgacagacaatgctatctaaccatagttcacgttaggggaagcatttttccatcagtttctttaaaattggattgtctggtgagttttgatattaaacattatgtagctaagtttttttttttagcatttcttttttatttttcaatctatattcacaggcccatacttcagtcagtccaatcatagtacagtgatgtggtggtagatgctatgaatttcttcattgtaaaatacggatcatttgtattttggggtgataaaatagttcaccatgggtatgagatatttattctttaaatcaaagtaaattagaatttttaaaaagcacaaaactgcaggacagtttatgaaataggtggcactattagggaatcttcctttaaagcaagaaatcatgttatttagaaagaaaaactaatcttaaacatactatttctaataaatatttatatttttatgaaataaagaggtatgtggaaattaatatttggtgatgttggacagtggaaaagtatctagagtttttacctgccttatctgaattcttcttgaaacttgagcttaaactctaatagctgtttccctttctattctgaacaactgtctccatttttcaagtgtgagagataagggctaatgatgacatctcatttattttgagtaaacattaaaattgttttacaagtctacttg

SEQ ID NO: 374 - DNA, 4879 bp, Homo sapiens
accaattcgccagcggttcaggtggctcttgcctcgatgtcctagcctaggggcccccgggccggacttggctgggctcccttcaccctctgcggagtcatgagggcgaacgacgctctgcaggtgctgggcttgcttttcagcctggcccggggctccgaggtgggcaactctcaggcagtgtgtcctgggactctgaatggcctgagtgtgaccggcgatgctgagaaccaataccagacactgtacaagctctacgagaggtgtgaggtggtgatggggaaccttgagattgtgctcacgggacacaatgccgacctctccttcctgcagtggattcgagaagtgacaggctatgtcctcgtggccatgaatgaattctctactctaccattgcccaacctccgcgtggtgcgagggacccaggtctacgatgggaagtttgccatcttcgtcatgttgaactataacaccaactccagccacgctctgcgccagctccgcttgactcagctcaccgagattctgtcagggggtgtttatattgagaagaacgataagctttgtcacatggacacaattgactggagggacatcgtgagggaccgagatgctgagatagtggtgaaggacaatggcagaagctgtcccccctgtcatgaggtttgcaaggggcgatgctggggtcctggatcagaagactgccagacattgaccaagaccatctgtgctcctcagtgtaatggtcactgctttgggcccaaccccaaccagtgctgccatgatgagtgtgccgggggctgctcaggccctcaggacacagactgctttgcctgccggcacttcaatgacagtggagcctgtgtacctcgctgtccacagcctcttgtctacaacaagctaactttccagctggaacccaatccccacaccaagtatcagtatggaggagtttgtgtagccagctgtccccataactttgtggtggatcaaacatcctgtgtcagggcctgtcctcctgacaagatggaagtagataaaaatgggctcaagatgtgtgagccttgtgggggactatgtcccaaagcctgtgagggaacaggctctgggagccgcttccagactgtggactcgagcaacattgatggatttgtgaactgcaccaagatcctgggcaacctggactttctgatcaccggcctcaatggagacccctggcacaagatccctgccctggacccagagaagctcaatgtcttccggacagtacgggagatcacaggttacctgaacatccagtcctggccgccccacatgcacaacttcagtgttttttccaatttgacaaccattggaggcagaagcctctacaaccggggcttctcattgttgatcatgaagaacttgaatgtcacatctctgggcttccgatccctgaaggaaattagtgctgggcgtatctatataagtgccaataggcagctctgctaccaccactctttgaactggaccaaggtgcttcgggggcctacggaagagcgactagacatcaagcataatcggccgcgcagagactgcgtggcagagggcaaagtgtgtgacccactgtgctcctctgggggatgctggggcccaggccctggtcagtgcttgtcctgtcgaaattatagccgaggaggtgtctgtgtgacccactgcaactttctgaatggggagcctcgagaatttgcccatgaggccgaatgcttctcctgccacccggaatgccaacccatggagggcactgccacatgcaatggctcgggctctgatacttgtgctcaatgtgcccattttcgagatgggccccactgtgtgagcagctgcccccatggagtcctaggtgccaagggcccaatctacaagtacccagatgttcagaatgaatgtcggccctgccatgagaactgcacccaggggtgtaaaggaccagagcttcaagactgtttaggacaaacactggtgctgatcggcaaaacccatctgacaatggctttgacagtgatagcaggattggtagtgattttcatgatgctgggcggcacttttctctactggcgtgggcgccggattcagaataaaagggctatgaggcgatacttggaacggggtgagagcatagagcctctggaccccagtgagaaggctaacaaagtcttggccagaatcttcaaagagacagagctaaggaagcttaaagtgcttggctcgggtgtctttggaactgtgcacaaaggagtgtggatccctgagggtgaatcaatcaagattccagtctgcattaaagtcattgaggacaagagtggacggcagagttttcaagctgtgacagatcatatgctggccattggcagcctggaccatgcccacattgtaaggctgctgggactatgcccagggtcatctctgcagcttgtcactcaatatttgcctctgggttctctgctggatcatgtgagacaacaccggggggcactggggccacagctgctgctcaactggggagtacaaattgccaagggaatgtactaccttgaggaacatggtatggtgcatagaaacctggctgcccgaaacgtgctactcaagtcacccagtcaggttcaggtggcagattttggtgtggctgacctgctgcctcctgatgataagcagctgctatacagtgaggccaagactccaattaagtggatggcccttgagagtatccactttgggaaatacacacaccagagtgatgtctggagctatggtgtgacagtttgggagttgatgaccttcggggcagagccctatgcagggctacgattggctgaagtaccagacctgctagagaagggggagcggttggcacagccccagatctgcacaattgatgtctacatggtgatggtcaagtgttggatgattgatgagaacattcgcccaacctttaaagaactagccaatgagttcaccaggatggcccgagacccaccacggtatctggtcataaagagagagagtgggcctggaatagcccctgggccagagccccatggtctgacaaacaagaagctagaggaagtagagctggagccagaactagacctagacctagacttggaagcagaggaggacaacctggcaaccaccacactgggctccgccctcagcctaccagttggaacacttaatcggccacgtgggagccagagccttttaagtccatcatctggatacatgcccatgaaccagggtaatcttggggagtcttgccaggagtctgcagtttctgggagcagtgaacggtgcccccgtccagtctctctacacccaatgccacggggatgcctggcatcagagtcatcagaggggcatgtaacaggctctgaggctgagctccaggagaaagtgtcaatgtgtagaagccggagcaggagccggagcccacggccacgcggagatagcgcctaccattcccagcgccacagtctgctgactcctgttaccccactctccccacccgggttagaggaagaggatgtcaacggttatgtcatgccagatacacacctcaaaggtactccctcctcccgggaaggcaccctttcttcagtgggtcttagttctgtcctgggtactgaagaagaagatgaagatgaggagtatgaatacatgaaccggaggagaaggcacagtccacctcatccccctaggccaagttcccttgaggagctgggttatgagtacatggatgtggggtcagacctcagtgcctctctgggcagcacacagagttgcccactccaccctgtacccatcatgcccactgcaggcacaactccagatgaagactatgaatatatgaatcggcaacgagatggaggtggtcctgggggtgattatgcagccatgggggcctgcccagcatctgagcaagggtatgaagagatgagagcttttcaggggcctggacatcaggccccccatgtccattatgcccgcctaaaaactctacgtagcttagaggctacagactctgcctttgataaccctgattactggcatagcaggcttttccccaaggctaatgcccagagaacgtaactcctgctccctgtggcactcagggagcatttaatggcagctagtgcctttagagggtaccgtcttctccctattccctctctctcccaggtcccagccccttttccccagtcccagacaattccattcaatctttggaggcttttaaacattttgacacaaaattcttatggtatgtagccagctgtgcactttcttctctttcccaaccccaggaaaggttttccttattttgtgtgctttcccagtcccattcctcagcttcttcacaggcactcctggagatatgaaggattactctccatatcccttcctctcaggctcttgactacttggaactaggctcttatgtgtgcctttgtttcccatcagactgtcaagaagaggaaagggaggaaacctagcagaggaaagtgtaattttggtttatgactcttaaccccctagaaagacagaagcttaaaatctgtgaagaaagaggttaggagtagatattgattactatcataattcagcacttaactatgagccaggcatcatactaaacttcacctacattatctcacttagtcctttatcatccttaaaacaattctgtgacatacatattatctcattttacacaaagggaagtcgggcatggtggctcatgcctgtaatctcagcactttgggaggctgaggcagaaggattacctgaggcaaggagtttgagaccagcttagccaacatagtaagacccccatctcttt

SEQ ID NO: 375 - DNA, 13003 bp, Homo sapiens
actagccattatctgacccttgtatttatttaaccatataacaaatgattgttctgtggaacagtcattttgatttcttgctggaaatgcccactttttttccgctagtattcagttcctccctctacacctggagtgtttgctctcctcctcccctctcctcatcttcctccccctttctcttctccctccttctccctccgttccttcttacactcagttgctctttaattttacctattccttctcattactgcattgatttttaaaacatactctacaaaatgcaatttgactgtctcatgcacggttagaaaacttctggttctacaagattagtttgagtgttctgcagacatatgaatgaggacttcaattatatattagagagattttagatgatagcttgatcttttcttgtggaaatacaacttctaaaaaatttagtttttagagtatttagtatatatgacatgtagaatctgcaaatctagaaatgtctgcatgatttttggattttttgacttttaatttacctgtttgacatttgctatgagcctttcactcataactaatatattatttagttctctaagtaatttttggttacctactatatatcagataccatgctaagtactaggaatacagaatcaaatgaggcatggtccataccctcaagtagcttacattagaatgagagagacagataaaccatttcactacagttcagtgtggaaaatagagtagcagaggcaggtacaaggtaccattgaacaatgattaatgactcttcctgggacttgggaaacatctttcagggaagtcgtcgaagctgttttaaaatatagcaaacttttgtatttagttcaggaacagcatggcccattttgccaatcacatcttaacagttggaaaagcaaacatattatctatcaggctttcctctaaactttaaatatgttttataagttataactccagagaaaatttacaaaggataaaccttaatatagaaggaattagagctgccacagcttctacacttttaacctctcaatattttatctgttgggctccactgtttcttcctggaattcacatcactgccaccactctgttctccttgtcctcatatcaatgtggccaaatattttccctgtatttcaatcaggacaagacatggttttttccccccatcaaaggaatggagaaccatagaatactagttttaaaatgtctttaggccaggtgccgtgacccatgtctgtaatcctagcactttgagaggttgaggcaggagaatcacttgagcccagagctcgaaaccagcctgggcaacatagtgaaacctctgtctctattttttaaataaaatttgaaaaagtctttagacataatctagtctaaaaatgaaggcttaaatgtgatgtatagccccctgccaagtggctatcaactgtgtgggcatcttcagtcatagggatcttattgccacagagaaatccctttaaacttattgggtaaaatctctccaatgtttattaagaaacacacaaaaaataaagcaaagaagaaaatgcaaaagagttataaatgagaggaagcaaaatgggcacttattaaaggtctaataaatgcacatttgtatccatcattctactgagttcttactcccaagatgttcttccctttagcaaacaaataagcaagtcagcaaagaaagaaagaacaaacaaaatgtggtgatcagggaagcattgaggagatggatggtggcaggtggcaagaggactataaaagttttacaaaatgtcttcctctgaatatgtttagagtcttgcattcaagcatttattatacaccaataatgtgagcaacactttacttgacaaagaaacagaaaagaaaggaaaggaagaaaacagaagagcatgaagagaaaatttaggatggattctgttcttcaacttcaaagcatctgctaatttgaatttagggaggaggggaaaaggttgaaagagaataagacatgtgtagaagacaaggacagagagaatttcagtccggtaagcaatgtaattcatttcaattctacaactatttatggagcagctacgtgggcccatcacccattaataaattggttacagaattaaaaccaacccaaagggaatatacttccttctttttcacagaccctctttgttctattctgcccatgaggttttcctcctcaagaaccagcaaatccaacgacagtcaatagcaggcattacaaatcagattcagaaaaataaatcaccccttctaaatttcttctagatattatcttttatgttttgagtataattgtatatagtatagactatagctatgtatgtacactttccacttacatcttttatttgcttttataatgtgtttcttaaaataaaactgcttttagaagttctgcacaattctgatttttaccaagtcaacctacttcttctctcaaaaggacaaacataaattgtctagtgaattccagtcaatttttccagaagaaaaaaaatgctccagttttctcctctaccaagacaggaagcacttcctggagattaatcactgtgttgccttgcaaaattgggaaggttgagagaaattagtaaagtaggttgtatcatcctactttgaatttggaatgtttggaaatggtcctgctgccatttggatgaaagcaaggatgagtcaagctgcgggtgatccaaacaaacactgtcactctttaaaagctgcgctcccgaggttggacctacaaggaggcaggcaagacagcaaggcatagagacaacatagagctaagtaaagccagtggaaatgaagagtcttccaatcctactgttgctgtgcgtggcagtttgctcagcctatccattggatggagctgcaaggggtgaggacaccagcatgaaccttgttcaggtaattaacactaactgacctggccaggtggggagcttccagagtaagctgaaaccattctgtgtgtcttaaaacccacatagaatgcttgagcttactgtgtaggaacagttcaagaatagagagttatagagtgttggaagtggaaaaggtctcattatcacaccatttgggcttctcctcttatgtaggaagaaacaaaggccagaaatattaggtgttttcttaagatcacacaacaccatagcagtagcagcactggggcttaaggcacatgagtaacaagtggagagtggatgaaccatatcttgctttggaacagcttcagtttttttttttaatgcaacgtaattttagctaaatatttgtgttgctagtatcatattataaaatttgccattatttcagcaagctagagaaatactccaaatagattaagaagtgagcaactgcaaaaacttactataaatagatagctatagtaaaaattgtaagagtgacctaaaaactatacttattctgttagaaatatctagaaaactactacgacctcaaaaaagatgtgaaacagtttgttaggagaaaggacagtggtcctgttgttaaaaaaatccgagaaatgcagaagttccttggattggaggtgacggggaagctggactccgacactctggaggtgatgcgcaagcccaggtgtggagttcctgatgttggtcacttcagaacctttcctggcatcccgaagtggaggaaaacccaccttacatacaggtaatggttcagaggggttttcacataagattggaattttataaactatatcataggagaaaatagcatctgcttcaatttttctcctacaggattgtgaattatacaccagatttgccaaaagatgctgttgattctgctgttgagaaagctctgaaagtctgggaagaggtgactccactcacattctccaggctgtatgaaggagaggctgatataatgatctcttttgcagttagaggtaaaaaaaaaaaaaaaaaaaaaaaagcaaaacaaaacaaaacaaaaaacacatgaaatgtatccattcatctatctggtgttgttgtactggaaaaggctcaaaagggatccttgttacatatctttccaataaatttttttcctactagaacatggagacttttacccttttgatggacctggaaatgttttggcccatgcctatgcccctgggccagggattaatggagatgcccactttgatgatgatgaacaatggacaaaggatacaacaggttagttacacatctctcagaatgattttggcattaatttttttatatgtagaaatctgttaataaccaagaatgctcaagaaatgagatgttctggattttccagtggatcagagatcagcagaatatatttttgttttaattattattgaaaatattttcagatgctttaacagttttcctatattggtaagcacaatataggaaatatcattaagtatttctttaatgactggatctttgtgatctaggggtaaccattattaagaaaaatttctcatatcaaaatacaaacattcaagggatagtatattgcactgaatctacattaaaatgtgctctggatgttacttatgtaatttcctccatttacttctttactcttcaaaccagaaataagaattaaatttcagaaactgagattctcttttttttttttttctggctgaggcattattttagtacttttaggttaaaagaatttttatgggcttgttctgaaggaaaagactaactcccaaatacaacgttcaaactgtttaggtagaagaatgtttctcagttcataactgtatgttttggggaatgacatccaaagttttcaaaaaaatcagctaaaacaattaacactacttctaaaaaaataggaaaacaattaatactatgtctgaggtttaactgggatttataatgaaaatgtaaacctctgtaggacgtacaaatgtgagtttagtcctggatagaattcttgattggttgagttaacgaattcttgtaaagaaaccttcctgcaaactctcaaatgagattgttcctagcatcacaagttacacaagtaatactagcaaaagtaaggtagatttacttactatattgatcataattacccaatgcctcccaattttagcattatgggtgtttttaaaaatatgaaggaaaaaattttgaataaagccagtgtttatgtattctaaatctgttgtgtgacaaatgctagacatgattgggcatactgtgttttaaaccaattttgcaaatcctatgacatctatcattattcatgtttttagtctcaatatgtacttcatgatgatgaggctgagacattatcaattaacatgaatatagtttcctttaactgagactgcaaatggcaaatgtaaatatattaaaacagtgtttagctttgcattgacaaatgaaggtaaatatctgatatgctaagcaagtgggttcattccattcctgagtacaagaaaagggatctggttcttctggagttaatatgcttgtgaggctgggggtgggtttggggccatggggggcaagtggatgtaactgggaaatcaatctcaaagattgattacaggtatgagttttaaaatacacttagctttccattaagtgtgtaattagtcaattgttcaattaaccaacaaacaaggtgtaaaaagccctgtgtggttccaagaagtaaaaaccaatacaatgcacagcagacctgtgtaatgcacatgtatttaaaaaataagtaactattgttctcaatttcttaaatagggaccaatttatttctcgttgctgctcatgaaattggccactccctgggtctctttcactcagccaacactgaagctttgatgtacccactctatcactcactcacagacctgactcggttccgcctgtctcaagatgatataaatggcattcagtccctctatggtgagtgacactgggaaaatcagccattgtagttttgcaatgatggtcttcagaagagctttcaaatgctacataaagtatttatgatttagttcaaagcaccgtgagaatgtttggaaagcatacaaatgggcatatattgaaacgtatcacatttcccctaatgttccctttaggacctccccctgactcccctgagacccccctggtacccacggaacctgtccctccagaacctgggacgccagccaactgtgatcctgctttgtcctttgatgctgtcagcactctgaggggagaaatcctgatctttaaagacaggtcaggctgaaaaattatattttcctaccattttaatctacaatgtttagaaaggaaaacacgcagaaacttgatagagattcttagacatttaaaacaaaaacgtttcttctgagcttggaatcatttagatctggtgctgccttttcccacattttcctaaaattgtcaggttcatttttgaaggcacaggctgatctggttcttagcttctaattgctgtttccaaatgtcttaagtcacagttacttttcaaaaggcatgagtagatctttcgaataataattttatttttacttcctttaaaaatgacatcaggatcaacattacatttaatcaagtaatttacttactgatggatcaatatgcacatgacaaacattcaaagagcacaaatgagaagcaaattaaaaattttagttcccagttctccctgtactcatccagagtcaagactttttgtgcatccttccagaatctttctacacacatacaagaatatatttacacagcacatacacgtatacaaacacggcctagcttttggaagagggtatagcacacgcactgttttgcatacattgcaggtaattaaagcttatgctgggctaattcatttgcacgatagaataatttttctttcatagaagacattactctggaaacctatgacgggagactcactacagtcttctgaagaaaaaggaaagaaattttctaatggcaatatacctgatttctatctgtcatccagcctagaagatgagagaatgggggaagctgggtgaggcaagacggtgaggaaaatattctaaaggtgaaagattgtttttcaatttacatttctttttacatatattttaggcacttttggcgcaaatccctcaggaagcttgaacctgaattgcatttgatctcttcattttggccatctcttccttcaggcgtggatgccgcatatgaagttactagcaaggacctcgttttcatttttaaaggtaattactatatcatcatttgtttaacttgccaaagtaaaccctctcataagaaattgaacaacactttaattttccctactacaagttctggctaatacagtagtcaacggtaatgaagaaataaccagggctgatatcattgtatttatatttcatagatgataaaaataaagacaagaagataaattacccagagttgtaaattctctcatttgaccttagttcattcattcagtctgcaaatttttgtgaaaagcccactgtaagctggtgactaaatctaaaatttgggctactactttaccatgaaaatcaaagatgctaaagtgtatttctaaagcgaaagggcttaactgttataattcaatatgactctgaattatttatatttaacaggaaatcaattctgggctatcagaggaaatgaggtacgagctggatacccaagaggcatccacaccctaggtttccctccaaccgtgaggaaaatcgatgcagccatttctgataaggaaaagaacaaaacatatttctttgtagaggacaaatactggaggtgagatgcaagagaaatgactttgtatggagcctaattagggaaattagtttcttttactaaggaaatcccccaccccaaccttaggcctgcttctctcttagtaggaaggatgggacttcagacaactgtgggaaagttcttactttaaaacagcagcaccttaggctctcctgctttcagtcccaagtgcagttggctggtgcttcccttggtgctgtcaccccacctgcctggagccccctcttctctcctcaacctattcaaatcttgcccatccttcaagtcctggctcaagtctcatcacctccatgcagctttccctcgtggactttagacccattgggaaaatgttctgagaacccagaccgcaatttagcgttcccttcccattgtcttttagtttggctcactgtctcactgtgtgtttgtcactgtctcattgtgtgtttgttttgtcttcctaacactactatatgattttcaagggctacctctaacctcacccacttgtcacctctacctgataatgatggctcatttaagagatgatgatcaatagcagtccagtttatggatacaacccaacactcacagacaggttgattcctgggtcatttggccagactttgagacatcgaggccgaccatctgatatccagccaatgggctaaaaacacacttactgtgctttgcttcttatcctaatcccttttcccaggaggccaccagagaagatttagatgtgcaggggaggggacagcaggcatatatgggccaattgtggtagggaattaaaattgcattttagatgttgattcaattcactttatatatatgttcacactttcatgtctttgtgacagaaagatgattaaggttctttctgtccaggcttaagaaatatgatgacaaacagcatgtgctacatacagcaggatgcggcccctgttccggatggagatatggctttcagaactctttacagtaccattaaagtcacatatttctatagtcccaaatatgcttggcatttatttgcagtatttataaagtttagtaaaattccacattaaacctaacatgatctaagatgttcggtaacatggcctctatgcaatgctgagctgtttcttttacttggtacagatttgatgagaagagaaattccatggagccaggctttcccaagcaaatagctgaagactttccagggattgactcaaagattgatgctgtttttgaagaatttggtaagaggatacttactgtgttggccatagagcacttgaaacattttatgatatcagagggaagaggagcattgaaactttttaataacaagtgtttcttagggccagttcccttctcaaaattttgattcgcctacatttgtactcattatagaactacttcacaaaataacttgtttggaaccataaagataattacacaaatctcgctactttatcttatacatgcatataaaatcaaagtgctccagtgtcacttacatctcgagctaacatgtggagtcaagctcgactttcagattaccatgttagcataaaaatcccatcaagtggtgtggccaggtttaatgttggttagctggccttctcctccaccctatcttattgctgctactaattcccagggagattttttgtctgtctttcctgagttgtcagtcattgcccatgccagtcatttgcaaatacttacctttccatgtgcccaaagttttaaaaaaaaaaaagattttgttttctactcaaggtaaggaagtggaggctgatgatctttattgaaaggtaacctgatcaccatgtttgcagagcactaaagggtcccctggtgttttgaaatagttgctgtgcttcctaggctgcaatgcagggaaaagggaggaggatttttggggaagaaagaaataggtgatgagagtttccaagcaagtggagaatttatctgatcggaagcagaataaccctgtaacctggaatctggctgtgttttcagacagagctggcaccgagtgctgtctccattcttccttgctgagtaaccttgaggaagcatcgaaatctgtctcaacctcaacttgctcaatctgtaaatggagttagacatacaacctcatagggttgttgcagaaataaatgaaaataaattcatgtaacaagcttggcatagtccctgacataaagtaaagctctataaacactttctatttttagttctctatgattctgagttttgtatattgtcaaatgtctttatttggaaaaatatcttactatttcccttgtctgtatttgcagggttcttttatttctttactggatcttcacagttggagtttgacccaaatgcaaagaaagtgacacacactttgaagagtaacagctggcttaattgttgaaagagatatgtagaaggcacaatatgggcactttaaatgaagctaataattcttcacctaagtctctgtgaattgaaatgttcgttttctcctgcctgtgctgtgactcgagtcacactcaagggaacttgagcgtgaatctgtatcttgccggtcatttttatgttattacagggcattcaaatgggctgctgcttagcttgcaccttgtcacatagagtgatctttcccaagagaaggggaagcactcgtgtgcaacagacaagtgactgtatctgtgtagactatttgcttatttaataaagacgatttgtcagttattttatcttattgttgtgtttgtttgtttcaagggcaagttgttctcataatttgggcactttatgggctgagcatgctcagcagtagactagagtctccatggcttggggttcacaatgggttccagaactgcagagaatctaccacttgccctcctcatgagccctgcaaacaggatgcttatttctaccacctagacattttatgtgtcctgacatacctaaggcaaaaaatctagaggggttgtgacattgtagagcaggctctaggaaaaactgtgaagggaatcctataatcatagcaaattgccttgtttgcacatctcattttacagggtgaggaaatcagacttgtttttcatcttttccttttacttataaattccctcagtgcaggtccctcccctgacctagcaagcaaacttcctcatatctaccctattcacatggtaaaatatactcttgtactcattttgtatctgcctgtgcctggatgtaaatgcccattggcaaatgacgattctaacattggtttatcatccataactaatgtctctagcacaatgcctcgtacatggtaagagccgtttttaacttatccattcatctgagagtaatttacaaatcatattccatatgccaggcattatgctaggttgcaggcataagaatatgaaaataatagacacaggcccctgccctcatcgagattataatccagcgaaaagaacacgtgtagataaccacaaatataaatacgcaattgtaaatttcataagagttataaagggaaaaaaataataggaggatctattttgaaccagatggttttagaagaacttttgagggaatggcattgaaggaggttttgaaaggaggtgtggagactaagaggggagatgatggcttggaccacatgggcacacgggagagttaggaatgagagtagactctatagatatgagatagataacagaacttagtgatggattagatatgcaatttgagagaaaaggaaatgttccgagtaaatcctaggtagcttgcttgagcataagagctgatggtgacggcatttactgagatggggaaagacttggagagaagaaggtttgtgaaggaagggcaagagttaggatgaattttttatgtttgcccatttttgaaatgtgttggagaaattcaagcacccaagagctaaaggaatctgaaatgcaaaagagacacacacatatatataaaacatatatgtatatggaaggtttcaacattgagattattcttaaagccagaagtatgggagagatcatatggggagagtttaagataaaactaatgaatagcaacatttggtcaaaatttacagcatttctttatttttaaaattacctaattttatttatttctaataggtactaccttagccacaacacaaaatccaaacgttaaaagacattatgcaatataaacaattttcctcccacccctgtttccaacatctaactccttttctcagaggtaaccaagcagatctttcttgaatccttccagagctattttacgcataccaagcattaatataatctttcaaaataaaaatggtactatgcaaaattacactgtcttgctctttgatttttttcacttaatgtatcttggcagctattccacattagtacatgtagaattgctttattcaatttttttttctttaggtgcacttaatttaatatcaagaccacaatacaaaaggcccaaatacaatgaaaaaacacatttgtccattaacaccaatgataatgctctttcagcacatgcctgccgaatggaatgcggatttaataaagctcactcctgaaaaaaataacccagtgagtctcaccacagccaacatccttaagcaatctggttgtgaaatgaatgtttataatgcttcaaacagcttaaacctgaagtttgataccacaccttcatgtttgcacagttctcaataagattatctacaatatttacaaccattcaaaggtaaaccattgattaaaaccacattcatttaagactcaataattcccataaatatgtacaattattatgtatcaataaaaaagaatcaagtaatatagagcctcaaactaaatggttaaatatatgaacgacttatactgacaactaatatttgattttctgtgactatttaaggttggttcttagcaaataatccctttaaaggcaaaattcacctcatttgagttttgacccagcagttcaacaacaatgatgaagttcacagtcttactggcaaaaccaatatgttgaaaagtcctcatttaacatctggataagttcttggaaactctgattttaagcaaagggatgcataaggaaaccatttttaccat

SEQ ID NO: 376 - DNA, 4000 bp, Homo sapiens
gcacgatctgttcctcctgggaagatgcagaggctcatgatgctcctcgccacatcgggcgcctgcctgggcctgctggcagtggcagcagtggcagcagcaggtgctaaccctgcccaacgggacacccacagcctgctgcccacccaccggcgccaaaagagagattggatttggaaccagatgcacattgatgaagagaaaaacacctcacttccccatcatgtaggcaagatcaagtcaagcgtgagtcgcaagaatgccaagtacctgctcaaaggagaatatgtgggcaaggtcttccgggtcgatgcagagacaggagacgtgttcgccattgagaggctggaccgggagaatatctcagagtaccacctcactgctgtcattgtggacaaggacactggtgaaaacctggagactccttccagcttcaccatcaaagttcatgacgtgaacgacaactggcctgtgttcacgcatcggttgttcaatgcgtccgtgcctgagtcgtcggctgtggggacctcagtcatctctgtgacagcagtggatgcagacgaccccactgtgggagaccacgcctctgtcatgtaccaaatcctgaaggggaaagagtattttgccatcgataattctggacgtattatcacaataacgaaaagcttggaccgagagaagcaggccaggtatgagatcgtggtggaagcgcgagatgcccagggcctccggggggactcgggcacggccaccgtgctggtcactctgcaagacatcaatgacaacttccccttcttcacccagaccaagtacacatttgtcgtgcctgaagacacccgtgtgggcacctctgtgggctctctgtttgttgaggacccagatgagccccagaaccggatgaccaagtacagcatcttgcggggcgactaccaggacgctttcaccattgagacaaaccccgcccacaacgagggcatcatcaagcccatgaagcctctggattatgaatacatccagcaatacagcttcatcgtcgaggccacagaccccaccatcgacctccgatacatgagccctcccgcgggaaacagagcccaggtcattatcaacatcacagatgtggacgagccccccattttccagcagcctttctaccacttccagctgaaggaaaaccagaagaagcctctgattggcacagtgctggccatggaccctgatgcggctaggcatagcattggatactccatccgcaggaccagtgacaagggccagttcttccgagtcacaaaaaagggggacatttacaatgagaaagaactggacagagaagtctacccctggtataacctgactgtggaggccaaagaactggattccactggaacccccacaggaaaagaatccattgtgcaagtccacattgaagttttggatgagaatgacaatgccccggagtttgccaagccctaccagcccaaagtgtgtgagaacgctgtccatggccagctggtcctgcagatctccgcaatagacaaggacataacaccacgaaacgtgaagttcaaattcaccttgaatactgagaacaactttaccctcacggataatcacgataacacggccaacatcacagtcaagtatgggcagtttgaccgggagcataccaaggtccacttcctacccgtggtcatctcagacaatgggatgccaagtcgcacgggcaccagcacgctgaccgtggccgtgtgcaagtgcaacgagcagggcgagttcaccttctgcgaggatatggccgcccaggtgggcgtgagcatccaggcagtggtagccatcttactctgcatcctcaccatcacagtgatcaccctgctcatcttcctgcggcggcggctccggaagcaggcccgcgcgcacggcaagagcgtgccggagatccacgagcagctggtcacctacgacgaggagggcggcggcgagatggacaccaccagctacgatgtgtcggtgctcaactcggtgcgccgcggcggggccaagcccccgcggcccgcgctggacgcccggccttccctctatgcgcaggtgcagaagccaccgaggcacgcgcctggggcacacggagggcccggggagatggcagccatgatcgaggtgaagaaggacgaggcggaccacgacggcgacggccccccctacgacacgctgcacatctacggctacgagggctccgagtccatagccgagtccctcagctccctgggcaccgactcatccgactctgacgtggattacgacttccttaacgactggggacccaggtttaagatgctggctgagctgtacggctcggacccccgggaggagctgctgtattaggcggccgaggtcactctgggcctggggacccaaaccccctgcagcccaggccagtcagactccaggcaccacagcctccaaaaatggcagtgactccccagcccagcaccccttcctcgtgggtcccagagacctcatcagccttgggatagcaaactccaggttcctgaaatatccaggaatatatgtcagtgatgactattctcaaatgctggcaaatccaggctggtgttctgtctgggctcagacatccacataaccctgtcacccacagaccgccgtctaactcaaagacttcctctggctccccaaggctgcaaagcaaaacagactgtgtttaactgctgcagggtctttttctagggtccctgaacgccctggtaaggctggtgaggtcctggtgcctatctgcctggaggcaaaggcctggacagcttgacttgtggggcaggattctctgcagcccattcccaagggagactgaccatcatgccctctctcgggagccctagccctgctccaactccatactccactccaagtgccccaccactccccaacccctctccaggcctgtcaagagggaggaaggggccccatggcagctcctgaccttgggtcctgaagtgacctcactggcctgccatgccagtaactgtgctgtactgagcactgaaccacattcagggaaatgcttattaaaccttgaagcaactgtgaattcattctggaggggcagtggagatcaggagtgacagatcacagggtgagggccacctccacacccaccccctctggagaaggcctggaagagctgagaccttgctttgagactcctcagcacccctccagttttgcctgagaaggggcagatgttcccggagatcagaagacgtctccccttctctgcctcacctggtcgccaatccatgctctctttcttttctctgtctactccttatcccttggtttagaggaacccaagatgtggcctttagcaaaactgacaatgtccaaacccactcatgactgcatgacggagccgagcatgtgtctttacacctcgctgttgtcacatctcagggaactgaccctcaggcacaccttgcagaaggaaggccctgccctgcccaacctctgtggtcacccatgcatcattccactggaacgtttcactgcaaacacaccttggagaagtggcatcagtcaacagagaggggcagggaaggagacaccaagctcacccttcgtcatggaccgaggttcccactctggcaaagcccctcacactgcaagggattgtagataacactgacttgtttgttttaaccaataactagcttcttataatgatttttttactaatgatacttacaagtttctagctctcacagacatatagaataagggtttttgcataataagcaggttgttatttaggttaacaatattaattcaggttttttagttggaaaaacaattcctgtaaccttctattttctataattgtagtaattgctctacagataatgtctatatattggccaaactggtgcatgacaagtactgtatttttttatacctaaataaagaaaaatctttagcctgggcaacaaaaaaa

SEQ ID NO: 377 - DNA, 6534 bp, Homo sapiens
gggataatgctcccgagaaggattctggcagcagttctcaaaggctagacttgagtggtattgctgcatatgcgctgattcttcagcttgtctctaaccgaggaagcattgattgggagctactcattcagaaaattaaaagaaagaagccagaaaatattatcaaccctttgagaacacgacacaacgaactttatattttaccacttccttgaatagttgcaggagaaataacaaggcattgaagaatggcagatgaacggaaagacgaagcaaaggcacctcactggacctcagcaccgctaacagaggcatctgcacactcacatccacctgagattaaggatcaaggcggagcaggggaaggacttgtccgaagcgccaatggattcccatacagggaggatgaagagggtgcctttggagagcatgggtcacagggcacctattcaaataccaaagagaatgggatcaacggagagctgacctcagctgacagagaaacagcagaggaggtgtctgcaaggatagttcaagtagtcactgctgaggctgtagcagtcctgaaaggtgaacaagagaaagaagctcaacataaagaccagactgcagctctgcctttagcagctgaagaaacagctaatctgcctccttctccacccccatcacctgcctcagaacagactgtcacagtggaggaagatttacttacagcctcgaagatggagttccacgatcaacaggaattgactccctctacagctgagccttcagaccagaaggaaaaggagtcagagaagcaaagtaagcctggtgaagaccttaaacatgctgccttagtttctcagccagagacaactaaaacttaccctgataaaaaggacatgcaaggcacagaagaagaaaaagcacccctagctttgtttgggcacactcttgttgccagcctggaagacatgaaacagaagacagaaccaagccttgtagtacctggcattgacctccctaaagagcctccaactccaaaagaacaaaaggactggttcatcgaaatgccaacggaagcaaaaaaggatgagtggggtttagttgcccccatatctcctggccctctgactcccatgagggaaaaagatgtatttgatgatatcccaaaatgggaagggaaacagtttgattctcccatgccaagtccctttcaagggggaagcttcactcttcctttagatgtcatgaagaatgaaatagttacagaaacatcgccctttgcccctgcctttttacagccagatgacaaaaaatctctgcaacaaaccagtggcccagctactgccaaagatagttttaaaattgaagagccccatgaggctaaacctgacaaaatggcagaagcaccaccctcagaggcaatgaccttacccaaagatgctcacattccagttgtagaagaacatgttatggggaaagttttagaggaagaaaaggaggccataaatcaagagactgtgcagcaaagggatactttcacccccagtggacaggaacctatacttactgaaaaggaaactgagctgaagcttgaagaaaaaaccaccatttctgacaaagaagctgtgccaaaagagagtaaacccccaaaacctgcagatgaagaaataggcataattcagacctccacagagcacactttctcagaacagaaagaccaagagcctaccacagatatgttgaaacaggactcgttccctgtaagtttggagcaagcagttacagattcagccatgacctctaaaacactggagaaagccatgaccgaaccatctgcattaattgaaaagagctcaattcaggaactttttgaaatgagagttgatgacaaagataagattgaaggagttggagctgcaacatcagctgagcttgatatgccattttatgaagataaatcaggaatgtccaagtactttgaaacatctgccttgaaagaagaagcaacaaaaagcattgagccaggcagtgattactatgaactgagtgacactagagaaagtgtccatgagtctattgataccatgtctcccatgcataaaaatggtgacaaggagtttcaaacaggaaaagaatcccagcccagtcctccagcacaagaagcagggtacagcactctcgcacagagttatccatcagatttacctgaagaacccagttctcctcaagaaagaatgttcactattgatccaaaagtgtatggagagaaaagggacctccacagtaagaataaggatgatttgacccttagcaggagtttaggacttggtggtaggtctgcaatagaacaaagaagcatgtcaatcaatttgccgatgtcttgcctagattccatagcccttggatttaactttggtcggggacatgatctttctcctctggcttccgatattctaaccaacactagtggaagtatggatgaaggggatgattaccttccagccaccacacctgcactggagaaagccccttgcttccctgtagaaagcaaagaggaagaacagatagagaaagtaaaagctactggagaagaaagtactcaagcggagatatcatgtgagtctcctttcctagccaaagatttttacaaaaatggtactgtcatggcacctgaccttcctgaaatgctagatctggcaggcacaaggtcaagattggcttctgtgagtgcagatgctgaggttgccaggaggaaatcagtcccatcagagactgtggttgaggatagtcgtactggcttgcccccggtaactgatgaaaaccatgtcattgtaaaaacggacagtcagctcgaagacctgggctactgtgtgttcaataagtacacagtcccattgccatcacctgttcaagacagtgagaatttatcaggggagagtggtaccttttacgaaggcactgatgataaagttcgaagagatttggccacagacctttcactgattgaagtgaaactggcagcagccggaagagtcaaagatgagttcagtgttgacaaagaagcatccgcgcatatctctggtgacaaatcaggactgagtaaggagtttgaccaagagaagaaagctaatgataggttggatactgtactagaaaagagtgaagaacatgctgattcaaaagaacatgccaagaaaactgaagaggctggtgatgaaatagaaacattcggattaggagtaacctatgagcaagctttggccaaagatttgtcaataccaacagatgcatcctctgagaaagcagagaagggtcttagttcagttccagagatagctgaggtagaaccatccaaaaaggtggaacaaggtctggattttgctgtccagggtcaactagatgttaaaattagtgactttggacagatggcttcagggctaaacatagatgatagaagggcaacagagctaaaacttgaggctacacaggacatgaccccctcatccaaagcaccgcaggaggcagatgcatttatgggtgttgagtctggccacatgaaagaaggcactaaagttagtgagacagaagtcaaacagaaggtggccaagcctgacttggtgcaccaggaggctgtagacaaggaggagtcctatgaatctagtggtgagcatgaaagtctcaccatggagtccttgaaagctgatgagggcaagaaggaaacatctccagaatcatctctaattcaagatgagattgccgtcaaattgtcagtggaaataccttgcccacctgctgtttcagaggctgatttagccacagatgagagagctgatgtccagatggaatttattcaggggccaaaagaagaaagcaaagagaccccagatatatccatcacgccttctgatgttgcagagccattgcatgaaacgatcgtatctgaaccagcagagattcagagtgaggaagaagagatagaagcccagggagaatatgataaactgctcttccgctcagacacccttcagataactgacctgggtgtctcaggtgccagggaggaatttgtggagacctgcccaagtgaacacaaaggagtgattgagtctgttgtgaccatcgaggatgatttcatcactgtagtgcaaaccacaactgatgaaggggagtcagggtcccacagcgtgcgttttgcagccctagagcagcctgaggtggaaaggagaccatctcctcatgatgaagaagagtttgaagtagaagaggcagctgaagcccaggcagaacccaaagatggttccccagaggctccagcttcccctgagagagaagaggttgcactttctgaatataagacagaaacctatgacgattacaaagatgagaccaccattgacgactccatcatggacgctgacagcctctgggtggacactcaagatgatgataggagcatcatgacagaacagttagaaactattcctaaagaggagaaagctgaaaaggaagctcggagatcatctcttgagaaacatagaaaagaaaagccttttaaaaccgggagaggcagaatttccactcctgaaagaaaagtagctaaaaaggaacctagcacagtctccagagatgaagtgagaaggaaaaaagcagtttataagaaggctgaacttgctaaaaaaacagaagttcaggcccactctccctccaggaaattcattttaaaacctgctatcaaatatactagaccaactcatctctcctgtgttaagcggaaaaccacagcagcaggtggggaatcagctctggctcccagtgtatttaaacaggcaaaggacaaagtctctgacggagtaaccaagagcccagaaaagcgctcttctctcccaagaccttcctccattctccctcctcggcgaggtgtgtcaggagacagagatgagaattccttctctctcaacagttctatctcttcttcagcacggcggaccaccaggtcagagccaattcgcagagcagggaagagtggtacctcaacacccactacccctgggtctactgccatcactcctggcaccccaccaagttattcttcacgcacaccaggcactcctggaacccctagctatcccaggacccctcacacaccaggaacccccaagtctgccatcttggtgccgagtgagaagaaggtcgccatcatacgtactcctccaaaatctcctgcgactcccaagcagcttcggcttattaaccaaccactgccagacctgaagaatgtcaaatccaaaatcggatcaacagacaacatcaaataccagcctaaaggggggcaggtacaaattgttaccaagaaaatagacctaagccatgtgacatccaaatgtggctctctgaagaacatcggccacaggccaggtggcggacgtgtgaaaattgagagtgtaaaactagatttcaaagaaaaggcccaagctaaagttggttctcttgataatgctcatcatgtacctggaggtggtaatgtcaagattgacagccaaaagttgaacttcagagagcatgctaaagcccgtgtggaccatggggctgagatcattacacagtccccaggcagatccagcgtggcatcaccccgacgactcagcaatgtctcctcgtctggaagcatcaacctgctcgaatctcctcagcttgccactttggctgaggatgtcactgctgcactcgctaagcagggcttgtgaatatttctcatttagcattgaaataataatatttaggcatgagctcttggcaggagtgggctctgagcagttgttatattcattctttataaaccataaaataaataatctcatccccaaactgtagtaattgttacaattttctatttaaaaaatgaatagtacatgcagaaattgacctgatttccatttgcaacaggaagacactggctttacatgggttcaattggacaattatttttgctctgctctgttttgcatggagtattattattttaaaaattgcatttttacctttcatgtgcctgaaggctatccactacattctgaaggccttgttaaaatccaagctgctcatttcactattctgtttctgagtgagaagataaaaactgcccattgtaacttatttcaggttaaattaaaccaaggagtctgattgcaggaagggaagagcatgtaagaaataagtttttttaaagtgttattttgtataaatgggaagaaagattcaattaagttattaacatttgggacctggataattatatcagagtatgtcagtccaataaattatttaactaattaaaaaatagttgcaaagcatttgagctgtggttgaggaagtggtgtttagaatgtcagttgatcagctagatttgtgtccacactaccagtttcaccccccctttcatctgtttgatacagtattatagatataaatatatatatatttctctgaggccatttgggatacttcctcatatactcgaatattataacttcttattcacaggatctg

SEQ ID NO: 378 - DNA, 2310 bp, Homo sapiens
acttccgtttttgctgggtaggcgacccggacggagggccggcgaggtgcggggtctggtgatgcgagctgcgcctctcggcaagatttcgcgctgcccatcccgggccctttcatcagtaatcggtagtggatcactctgccaagcggcaggaagaattaaggaaacgacaaggagacgctcggctctctcccgcttggctccttgcggcctcctcttcccttcgctccggcccggtgaaactgaacttataatcgtcactggattgtaagtacccgaggcgaagagagctcgctgagccctgattttttgagtgtctttgttccgggagagtttgtgagttgaaagtatctctgctgggctttctgggccgaaaaccgttccgggggagccgccatttgctttcctgttccctagctagctagctagctctctccgcgttgtccggcagcggcacctagaggttgggacttggcattgcatctgatttaatgaacttaagtctgtgaataagcctttgtgttaacgactggtattcggtcacagcatatttagagaaaagacttggagcttaaataaaaactaaggcaaaatagacgcttagctgctgatctacagagaacttcttgtaattaaaagatttcaattcatagcaaactggtgttttaaactattgcagtagctggaactttttagtgtaaccagcatttattggagaagtgaatcacaaggaaataaagatgagtaaaagcaaagatgatgctcctcacgaactggagagccagtttatcttacgtctgcctccagaatatgcctctactgtgagaagggcagtacagtctggtcatgtcaacctcaaggacagactgacaattgagttacatcctgatgggcgtcatggaatcgtcagagtggaccgtgttccattggcctcaaaattagtagacctgccctgtgttatggaaagcttgaaaaccattgataaaaaaactttttacaagacagctgatatctgtcagatgcttgtatccacagttgatggtgatctctatcctcctgtggaggagccagttgctagcactgatcctaaagcaagcaagaaaaaggataaggacaaagagaaaaagtttatctggaaccacggaattactctgcctctaaagaatgtcaggaagagaaggttccggaagacagcaaagaagaaatatattgaatctccagatgttgaaaaagaagtgaaacgattgctgagtacagatgctgaagctgttagtactcggtgggaaataattgccgaagatgaaacaaaggaggcagaaaatcaaggcctggatatctcttctccaggaatgtctggtcacaggcagggccatgactcattagaacatgatgagcttcgggagatattcaatgacctcagcagcagcagtgaggatgaagatgagacccagcatcaagatgaagaagatataaacatcattgacacggaggaagatctggagagacagctacaggacaagctaaatgaatcagatgaacagcaccaggaaaatgaaggaaccaatcagctggttatgggaattcagaagcagattgacaacatgaaaggcaagctccaagagacccaggacagggcaaaacgacaagaggatctcatcatgaaagtggaaaatctggctctcaagaacagatttcaggctgtactggatgagctcaaacaaaaggaagaccgagaaaaggagcaactcagctctttgcaagaggagctagaatcactcctagagaagtaaaaagaactgatatttaatttcagtcttcagactggtcagcattagaaaattcttggctttattgtactgggtattaagaccttgctcttcctagtccttttaatgctgtgtgttctgttaagttctttcatttgtttgtaattttgtttttcagcaaatttatattgttttgctaggtgttcatcctataagaagcaggattgtataggcagaaaaatgattgtaggaaagttgcaggattagcggaatgtatggttcaaccttaattatagcttcattgcaggactttactgtttctccattttctagaagctgctgttgctgctttgtgatgacgtgagatcaataagaagaacctagtctagagacaatgatgctagtttgcatatgttttcctatgcaataattgttttcccagttattcaaagcagctttctatatgtagagatgcaaattattaagttgtttccaatacaataaataaaagcatctgtttttcactttaaaaaaaaaaaaaaaa

SEQ ID NO: 379 - DNA, 3111 bp, Homo sapiens
aaccacgcagcggttccgagcctctgttttccgcttttagctaggaggacggaagttgctggcaggcggcatttggccggtacaccgccggaagtgtggaggtgtggctgcccgaggcggtagagcggagaaagcctattttcttttcgtttagatacattgccttttgcctaggctggcgtcgagacttgaggccgttgcagactttggcgcggctcgcgcctcctgcttcaagagcccagcggtgagagctggcctgcggcacgcggcctaatgccagacagtaacagtttggaggatcaagatgttgaccaacttgaggatatttgcaatgagtcatcagacaatacccagtgtgtatattaataatatatgctgctataaaataagagcaagtttaaaaagattaaagccacatgtgccgcttggaagaaattgcagttctctaccaggcttaataggaaatgatatcaaatcccttcattccatcatcaatcctcccatagctaaaatccgtaatattggaattatggctcatattgatgcaggcaaaactaccaccacagaaagaatattgtactattccggatatacaagatcactgggagatgttgatgatggagacacagtgacagatttcatggcccaagagcgagaaagaggcattactattcaatcagctgctgttacatttgattggaaaggttatagagtcaatctaattgatacaccaggtcatgtggactttaccttggaggttgagcggtgcctaagagtgttggatggtgcagtggctgtatttgatgcctctgctggtgtagaggcccagactctcacagtatggaggcaagctgataaacacaatatacctcgaatctgttttttaaacaagatggacaaaactggagcaagctttaagtatgcagttgaaagcatcagagagaagttaaaggcaaagcctttgcttttacagttaccaattggtgaagccaaaactttcaaaggagtggtggatgtagtaatgaaagaaaaacttctttggaattgcaattcaaatgatggaaaagactttgagagaaagcccctcttggaaatgaatgatcctgaattgctgaaggaaacaactgaagcaaggaatgccttaattgaacaagttgcagatttggatgatgaatttgctgacttggttttagaagaatttagtgagaattttgatttgttaccagctgaaaagctacagactgcaatacatagagtgacactagctcagacagcagtgcctgtgctttgtggaagtgccctgaaaaacaaagggatacagcccttgttagatgctgttactatgtacttaccttcacctgaagagcgtaactatgaatttctgcagtggtataaggatgacttatgtgcattggcatttaaagttctccatgacaagcagcgaggaccactggtttttatgcgcatttactcaggcactataaaaccccagttggccattcataatattaatggaaactgcacggagagaataagtcgtctgcttttgccgtttgctgaccaacatgtagaaatcccttcattgactgctggtaacattgctttgactgttgggcttaaacatactgccactggagacaccattgtctcatccaagtccagtgcattagctgcagctcgtagagccgaacgggagggagaaaagaagcacagacaaaacaatgaagcagagagacttttattggctggagtggagattccagaacctgttttcttctgtaccatagaacccccatcactgtctaagcagccagatttggaacatgcgttgaaatgtcttcagcgtgaagatcccagtttgaaagtgaggctagatcctgactctggacaaactgttctgtgtggtatgggggagttacatatagagattattcatgatcgaatcaagagggaatatggactggagacctatctcgggcctctccaggtggcatatcgagagaccatcctaaactcagttcgtgccacagataccttagatagaactttaggagacaaaaggcatcttgtgactgtagaagtggaagcaaggccaattgaaacatcatctgttatgcctgtgattgagtttgagtatgctgaaagtatcaatgaaggccttttgaaggtctcccaagaggccattgaaaatggaattcacagcgcatgtctccaaggaccattgcttggatccccaattcaggatgtagcaattactttacattccctgacaattcatcctggcacctccacaactatgatttctgcctgtgtctcaagatgcgtgcaaaaggctctgaagaaagctgataagcaagttttggagcctctgatgaatcttgaggttacagtagctagagattatctcagccctgtcctggcagatctggcacaaagaagaggaaacattcaggaaattcagactcgccaggacaacaaagttgttattggatttgttcccttagcagaaattatgggttattcaactgtgcttcgaacgctaacatcaggctcagctacttttgccttagaactatctacttatcaagccatgaatcctcaagatcaaaatacactgctcaaccggagaagtggtttgacctaaatgttttagtttttggagagaaattcaggagcacctagctacttcattttcagtaagaacaatttttattgctttatttattggacgaataaagtactgtttcagtacattcagagaactagataaaagatataacttaagctttgatagtggcactggagccacccgttttaatttatataatgagaaatgtgctttgatgtttaaagccactgtacctgaatcatgctgttcatctatgaagttattactataagtagccttcagaagagtggtatcacaaagttgtgtttcttttgtgtccttaagcttgtctcacaagaaagatgccaggcctctaaatgtaataagatagagggtcaaaggttcaatcaataaaaatattttattcaaaaaacagtctaatatcttattttacatgatttcaaaataaagttgattgtagtacaaaaaaaaaaaaaaaaaaa

SEQ ID NO: 380 - DNA, 2327 bp, Homo sapiens
aaatggtagaactagtgatctcacccagcctcactgtaaacagcgattgtctggataaactgaagtttaaccgtgctgacgctgctgtgtggactctgagtgacagacaaggcatcaccaaatcggcccccctgagagtgtcccagctcttctccagatcttgcccacgtgtcctcccccgccagccttccacagccatggcagcctacggccagacgcagtacagtgcggggatccagcaggctaccccctatacagcttacccacctccagcacaagcctatggaatcccttcctacagcatcaagacagaagacagcttgaaccattcccctggccagagtggattcctcagctatggctccagcttcagcacctcacccactggacagagcccatacacctaccagatgcacggcacaacagggttctatcaaggaggaaatggactgggcaacgcagccggtttcgggagtgtgcaccaggactatccttcctaccccggcttcccccagagccagtacccccagtattacggctcatcctacaaccctccctacgtcccggccagcagcatctgcccttcacccctctccacgtccacctacgtcctccaggaggcatctcacaacgtccccaaccagagttccgagtcacttgctggtgaatacaacacacacaatggaccttccacaccagcgaaagagggagacacagacaggccgcaccgggcctccgatgggaagctccgaggccggtctaagaggagcagtgacccgtccccggcaggggacaatgagattgagcgtgtgttcgtgtgggacttggatgagacaataattatttttcactccttactcacggggacatttgcatccagatacgggaaggacaccacgacgtccgtgcgcattggccttatgatggaagagatgatcttcaaccttgcagatacacatctgttcttcaatgacctggaggattgtgaccagatccacgttgatgacgtctcatcagatgacaatggccaagatttaagcacatacaacttctccgctgacggcttccacagttcggccccaggagccaacctgtgcctgggctctggcgtgcacggcggcgtggactggatgaggaagctggccttccgctaccggcgggtgaaggagatgtacaatacctacaagaacaacgttggtgggttgataggcactcccaaaagggagacctggctacagctccgagctgagctggaagctctcacagacctctggctgacccactccctgaaggcactaaacctcatcaactcccggcccaactgtgtcaatgtgctggtcaccaccactcaactaattcctgccctggccaaagtcctgctatatggcctggggtctgtgtttcctattgagaacatctacagtgcaaccaagacagggaaggagagctgcttcgagaggataatgcagagattcggcagaaaagctgtctacgtggtgatcggtgatggtgtggaagaggagcaaggagcgaaaaagcacaacatgcctttctggcggatatcctgccacgcgaacctggaggcactgaggcacgccctggagctggagtatttatagcaggatcagcagcatctccacctgccatctcaccctcagaccccctcgccttccccacctccccaccgagaactccagagacccagatgttggacaccaggaaggggccccacagccgagacgactgtccagtgaccatctcagaagccgtccatcagtccaaatgggggttctgagaaggaaagtacccaacattggcttcggagtatttgactttggggaaaagggctggctcggagtctagactcttctgtaagactcacagaacaaaagcaaggaattgctgatttggggggtgcctggtgatgaggaggggatgggtttgtcttgtcttctttttaatttatggactagtctcattactccggaattatgctcttgtacctgtgtggctgggtttcttagtcgttggtttggtttggttttttgaactggtatgtggggtggttcacagttctaatgtaagcactctattctccaagttgtgctttgtggggacaatcattctttgaacattagagaggaaggcagttcaagctgttgaaaagactattgcttatttttgtttttaaagacctacctgacgtcatgtggacagtgcacgtgccttacgctacatcttgttttctaggaagagggggatgctgggaaggaatgggtgctttgtgatggataaaaggcattaaataaaaccacgtttacattttg

SEQ ID NO: 381 - DNA, 3193 bp, Homo sapiens
aggaggagactcaggcaggccgcgctccagcctcaccaggctccccggctcgccgtggctctctgagcccccttttcagggaccccagtcgctggaacatttgcccagactcgtaccaaacttttccgccctgggctcgggatcctggactccggggcctccccgtcctcccctttcccgggttccagctccggcctctggactaggaaccgacagcccccctccccgcgtccctccctctctctccagccgttttggggaggggctctccacgctccggatagttcccgagggtcatccgcgccgcactcgcctttccgtttcgccttcacctggatataatttccgagcgaagctgcccccaggatgaccacgctggccggcgctgtgcccaggatgatgcggccgggcccggggcagaactacccgcgtagcgggttcccgctggaagtgtccactcccctcggccagggccgcgtcaaccagctcggcggcgtttttatcaacggcaggccgctgcccaaccacatccgccacaagatcgtggagatggcccaccacggcatccggccctgcgtcatctcgcgccagctgcgcgtgtcccacggctgcgtctccaagatcctgtgcaggtaccaggagactggctccatacgtcctggtgccatcggcggcagcaagcccaagcaggtgacaacgcctgacgtggagaagaaaattgaggaatacaaaagagagaacccgggcatgttcagctgggaaatccgagacaaattactcaaggacgcggtctgtgatcgaaacaccgtgccgtcagtgagttccatcagccgcatcctgagaagtaaattcgggaaaggtgaagaggaggaggccgacttggagaggaaggaggcagaggaaagcgagaagaaggccaaacacagcatcgacggcatcctgagcgagcgagcctcagcaccccaatcagatgaaggctctgatattgactctgaaccagatttaccactaaagaggaaacagcgcagaagccgaaccaccttcacagcagaacagctggaggaactggagcgtgcttttgagagaactcattaccctgacatttatactagggaggaactggcccagagggcgaagctcaccgaggcccgagtacaggtctggtttagcaaccgccgtgcaagatggaggaagcaagctggggccaatcaactgatggctttcaaccatctcattcccggggggttccctcccactgccatgccgaccttgccaacgtaccagctgtcggagacctcttaccagcccacatctattccacaagctgtgtcagatcccagcagcaccgttcacagacctcaaccgcttcctccaagcactgtacaccaaagcacgattccttccaacccagacagcagctctgcctactgcctccccagcaccaggcatggattttccagctatacagacagctttgtgcctccgtcggggccctccaaccccatgaaccccaccattggcaatggcctctcacctcaggtaatgggactcctgaccaaccacggtggggtacctcatcagccccagactgattacgcgctctcccctctcaccgggggtctggaacctaccaccacggtgtcggccagctgcagtcagagactagaccatatgaagagcttggacagtctgccaacatctcagtcctactgtccacccacctatagcaccacaggctacagtatggaccctgtcacaggctaccaatatgggcagtatggacaaagtaagccttggactttttagcaggtgcctttcattatctcaagccagatatcgcttggtttcaaatccttttgaacacgttcgacaaaagcagtggagaagaggaagacctggagcaataaaagacaaatgcaacattttaaggcaatggtttcacatggttacatatcaaaacatcccaattctttagtgctgatcatcgaggagctagaacattccatttgcttgtgtgcgtgcgtgcgtgtgtgtgtgtgtgtgtgtattgagatttacccagactggtttgggcaagcagactgttctaaaatataatagaataccctaaagtataacatgtcgatgttcgatgctgatacttctacaactttaaaactgctcatttcatgaagcaagaatggaggaatccttgactcttacacactggaaattgaaataaagataaatgcaaccatttttaggaagctagactagctgtaaaggacctcctaaataaattatttgttactgtatcctcatttgtaatctagttgtcaataaatggcccggacatgtcttgctaacaggatatgggctaccaggaagaaggacttgtttccctttcctgtgtggggagaggtgtgtgacgtttttccagttcacatttatttggtagcccacctgggttggaggaagggcacggtggagagaaagtgacatgcattcacatatctgcttatcagtgtgcaatactgtgtacctcatggatgctttggcaatgcccaaggcgatataagcaaaatcagaagtatatttttgcaggtgcttttattttcacagcccataattcatagtgatagagtgcagtgatgtttgccatttgctggacaaccaacacccgggttgctcctttgattagagaccagatcagataattatgcttttaaactgattacgtttacattcttctcttttctatgaaaggcagggcaagaacagaagtgttcacatggctctcatgtacttttaaattatacaatgatatccaatattaaaagattataggaactgaggtttacatacgtttgtgtggtgacattttagaatgtcaataaatttgctttttgagatgttgagaggaacaagaaggtggaaggcagtgttatttatttctttctattcttggaaccacgaatgaggtaggcacaaatacattccttttagagttaagaactatgacgtagcgagttagtgagactagacatagtaccgaatttagttcatgcattggtcttagagggtgatggaacaagagaagtactatctttgtgttgcagcctcaaccaacaacaatgtgttgtaaaaatgtctttcatgtaaaaagtgcagtaaatatttactatttataatgaataaacagttatgaaaactt

SEQ ID NO: 382 - DNA, 943 bp, Homo sapiens
gagaattcaaaaagggctgatggtaggctttgaacatggggttggctgtttcccagtaaaactggaattcctgtcgttactgtttccttatcaaagaaggggcaagctcttttgccttttaggccagacatagcaaacgctttataattggcatagacataaaggataaaaggaaaataaccgtctgccgatggtccgtacttcttaaaaaacataggtaatagaaaatatacacaagtcagaatgtgaaattaaataatggtttgaacagaaaattcaaacaagactctttccaatttaaagggccaaaccctaccaaagagagggagttgactggcttttaaaaagtatttaaataccacaaatgacatttaatttcactgtattcagctttaagttgttcacaatgaaaccacactttcaaacaagcaggttcaagctgctgaatagacattatttcttgcattaaaataccactaatgcattctcttgcaacactgccagacatgggattgtcaccatagaattagttggtactatgccatctttcactctttcacaagtcagtgatggaacctgctttatgaccaagattcatcctcaaataagccacatgtacccttctgacaaagctgtgtaaagtattagaatctgatgctctagaaagatcctagttgcccttgtgtatatttactgcctgcttgagtgtttctatgtgtgggttttcctgtatcttgtagaaatgttggggtgttttcctctgccatatggctcgtggcctgcgagccaactatttcagctgtattttaccttcatttttgatgaggtgatttaaattttgtttcactttgtgtagtgaattccacagtagttttctgattgttgttaaaaatgacttaacatattacacagatattcaataaaaatgttttatttcctgttg

SEQ ID NO: 383 - DNA, 3753 bp, Homo sapiens
gcggagccggaggagccgccgcaaagatggaggagccgtcgaggaggtgctgccgccgctgccgccgccgctgctgccgccgccgcccgcgaagccggagctcgagccgcagcggggatgccgttctgagtgcctgactgcctcgccccgaaggatggcctcggatgggcattagaggcacggcggccccgggctcccgtcccgtccgtctgtctgttatcgtctgtctctcttgacatcaccgcagctccaccccctcccgtcccagcccccaacgccagcttcctgcaggcccagagccggcatgaactctcccaacgagtcggatgggatgtcaggtcgggaaccatccttggaaatcctgccgcggacttctctgcacagcatccctgtgacagtggaggtgaagccggtgctgccaagagccatgcccagttccatggggggtgggggtggaggcagccccagccctgtggagctacggggggctctggtgggctctgtggaccccacactgcgggagcagcaactgcagcaggagctcctggcgctcaagcagcagcagcagctgcagaagcagctcctgttcgctgagttccagaaacagcatgaccacctgacaaggcagcatgaggtccagctgcagaagcacctcaagcagcagcaggagatgctggcagccaagcagcagcaggagatgctggcagccaagcggcagcaggagctggagcagcagcggcagcgggagcagcagcggcaggaagagctggagaagcagcggctggagcagcagctgctcatcctgcggaacaaggagaagagcaaagagagtgccattgccagcactgaggtaaagctgaggctccaggaattcctcttgtcgaagtcaaaggagcccacaccaggcggcctcaaccattccctcccacagcaccccaaatgctggggagcccaccatgcttctttggaccagagttcccctccccagagcggcccccctgggacgcctccctcctacaaactgcctttgcctgggccctacgacagtcgagacgacttccccctccgcaaaacagcctctgaacccaacttgaaagtgcgttcaaggctaaaacagaaggtggctgagcggagaagcagtcccctcctgcgtcgcaaggatgggactgttattagcacctttaagaagagagctgttgagatcacaggtgccgggcctggggcgtcgtccgtgtgtaacagcgcacccggctccggccccagctctcccaacagctcccacagcaccatcgctgagaatggctttactggctcagtccccaacatccccactgagatgctccctcagcaccgagccctccctctggacagctcccccaaccagttcagcctctacacgtctccttctctgcccaacatctccctagggctgcaggccacggtcactgtcaccaactcacacctcactgcctccccgaagctgtcgacacagcaggaggccgagaggcaggccctccagtccctgcggcagggtggcacgctgaccggcaagttcatgagcacatcctctattcctggctgcctgctgggcgtggcactggagggcgacgggagcccccacgggcatgcctccctgctgcagcatgtgctgttgctggagcaggcccggcagcagagcaccctcattgctgtgccactccacgggcagtccccactagtgacgggtgaacgtgtggccaccagcatgcggacggtaggcaagctcccgcggcatcggcccctgagccgcactcagtcctcaccgctgccgcagagtccccaggccctgcagcagctggtcatgcaacaacagcaccagcagttcctggagaagcagaagcagcagcagctacagctgggcaagatcctcaccaagacaggggagctgcccaggcagcccaccacccaccctgaggagacagaggaggagctgacggagcagcaggaggtcttgctgggggagggagccctgaccatgccccgggagggctccacagagagtgagagcacacaggaagacctggaggaggaggacgaggaagaggatggggaggaggaggaggattgcatccaggttaaggacgaggagggcgagagtggtgctgaggaggggcccgacttggaggagcctggtgctggatacaaaaaactgttctcagatgcccagccgctgcagcctttgcaggtgtaccaggcgcccctcagcctggccactgtgccccaccaggccctgggccgtacccagtcctcccctgctgcccctgggggcatgaagagccccccagaccagcccgtcaagcacctcttcaccacaggtgtggtctacgacacgttcatgctaaagcaccagtgcatgtgcgggaacacacacgtgcaccctgagcatgctggccggatccagagcatctggtcccggctgcaggagacaggcctgcttagcaagtgcgagcggatccgaggtcgcaaagccacgctagatgagatccagacagtgcactctgaataccacaccctgctctatgggaccagtcccctcaaccggcagaagctagacagcaagaagttgctcggccccatcagccagaagatgtatgctgtgctgccttgtgggggcatcggggtggacagtgacaccgtgtggaatgagatgcactcctccagtgctgtgcgcatggcagtgggctgcctgctggagctggccttcaaggtggctgcaggagagctcaagaatggatttgccatcatccggcccccaggacaccacgccgaggaatccacagccatgggattctgcttcttcaactctgtagccatcaccgcaaaactcctacagcagaagttgaacgtgggcaaggtcctcatcgtggactgggacattcaccatggcaatggcacccagcaggcgttctataatgacccctctgtgctctacatctctctgcatcgctatgacaacgggaacttctttccaggctctggggctcctgaagaggttggtggaggaccaggcgtggggtacaatgtgaacgtggcatggacaggaggtgtggacccccccattggagacgtggagtaccttacagccttcaggacagtggtgatgcccattgcccacgagttctcacctgatgtggtcctagtctccgccgggtttgatgctgttgaaggacatctgtctcctctgggtggctactctgtcaccgccagatgttttggccacttgaccaggcagctgatgaccctggcagggggccgggtggtgctggccctggagggaggccatgacttgaccgccatctgtgatgcctctgaggcttgtgtctcggctctgctcagtgtagagctgcagcccttggatgaggcagtcttgcagcaaaagcccaacatcaacgcagtggccacgctagagaaagtcatcgagatccagagcaaacactggagctgtgtgcagaagttcgccgctggtctgggccggtccctgcgagaggcccaagcaggtgagaccgaggaggccgagactgtgagcgccatggccttgctgtcggtgggggccgagcaggcccaggctgcggcagcccgggaacacagccccaggccggcagaggagcccatggagcaggagcctgccctgtgacgccccggcccccatccctctgggcttcaccattgtgattttgtttattttttctattaaaaacaaaaagtcacacattc

SEQ ID NO: 384 - DNA, 5634 bp, Homo sapiens
gccttttccctccggctcgggagcgtctcgcttgcgccccgggcccgcggcgcccgcgcggctgcgagcctcgggtggccgcgtgccggctccaggaagccggagagggcgcggcggccaggatggcgcggcacgggccgtgcggctagacgggagccgagggaaccgccggctcgcgccctccgttctttcccggagccggcttcacgcagggccgggaacggccgtgcctctgggatccgccttcgctgacgccgggcacctacctggacgcgagcgagcgagatgcccaaccccaaaaacagcaaaggcggccgcaaaaacaagcgcgccaacagcagcggcgacgagcaggaaaatggagccggggccctggcagcggcgggcgcggcgggagcggcggccgggggggccctggcggcggcggccggttgcggggcggcggcggcgggcgcgccgggcgccggaggcgcggcgggcgccggaggcgcggggactggcgccgcgaacgctgcggccgccgcgggggctgcggccgcgggcgatgccaaaaacgaagccccatgtgccactcccctgatctgcagcttcggtaggccggtggacctggagaaggacgactaccagaaggtggtgtgcaacaacgagcactgcccctgcagcacctggatgcacctgcagtgcttctacgagtgggagagcagcatcctcgtccagttcaactgcatcggccgcgcgcgcagctggaacgagaagcaatgccgccagaacatgtggacaaagaagggctacgacctggccttccgcttctgctcttgccgctgtggccagggccacttgaagaaggacacagactggtatcaggtgaagcggatgcaggacgagaaaaagaagaagtctggctccgagaagaacacagggaggcctcctggtgaggcggcggaggaggcaaaaaagtgcaggcccccaaataagccccagaaaggcccaagccacgacctcccccgccggcattccatggaccggcagaactcccaggagaaggcagtgggtgccgcagcctacggtgcccgttcccccggtggctccccgggccagtccccacccacgggctactccatcctctctcctgcccacttcagcggcccccgctcctccagatacctcggggagttcttaaagaacgccatccatctggagcctcacaagaaggccatggctgggggccatgtgttcagaaatgcccactttgattacagccctgcggggttggcagttcacagggggggacacttcgacacccccgtgcagttccttcggcggctggacctctccgaactcctcactcacatccccaggcataagctgaacactttccacgtgcgcatggaagacgatgcccaagtgggccagggggaagacttgcggaagttcattctggccgcgctcagtgccagccacagaaacgtggtaaactgtgccctgtgccaccgggcgctcccggtgttcgaacagttcccactggtggatggaactttgttcctaagcccgtcgagacatgatgagatcgaatatgatgttccttgtcaccttcaagggagactcatgcatctgtatgccgtgtgcgtggactgcctggaaggggttcacaagatcatctgcatcaagtgtaagtcacggtgggatggcagctggcaccagctgggcactatgtacacctacgacatcctggctgcctctccatgttgtcaggcccgcctgaactgtaagcactgtgggaagccggtgatcgacgtgaggatcgggatgcagtacttctccgaatatagcaacgtccagcagtgtccacactgtgggaacctggactaccacttcgtgaagccattttcctccttcaaagttctcgaagcttattgatgaaagctttgctttagtaatagctattttattgatattattactttattacatatcttttatagggaaacattctgtgacattaatttcctttctaatttaaaggagagttactttgttgtatgtgtgccactaaaataggggctgcccttgccctgtcttgattcccgagtgttaatctgtggttttgaccagagcccagatgggtaatcctgtgcatttgggttggggttcactcttaccaagaatctttgatgcagctttaagatggtggggaggatggggtgaatttaggaaaggaatttgtggttataaactaagagcttgataggagttggaaggaaactcttactaaaatgttaactttctaaaaaccttcttttagatcttccttgggcctttggaaaaatatgtgacaagtgaatgtaagtctgtgcctggagagctaatagtgcattagtctatctcagcctagtgttctgcagcacacatgggcaggcagtttactcacactgacaggtgacctgaaagtggcacaagtgctgtttctatcactattgtaatttgccagttcatttttcatgctgaaagtaatatccaaattgtaagacatatgaaagatattagtgttgcaaatatgtttaggtaaactgacctataacagaatatgtgaaatgaatttggaaataatgcaagaaggcagaactcaatcatttaaattgtgtctttgaagttggtaatatagcttttaaggagaacccatgaataacctgatttgggcagtgatgatttattacaggttgcactgttgaagtgtcatttggtgtcaggttcttctcacaggtaaatctttcagccacagaatctaactggtgagcttcagaaccaataattgccacatttattgtcctcaaaattgcttatggccatgtttaaccaattaattctgagtttccaaaatcaaagatttgaccttaagagggaagggaaaaaagtgtgaaaggatgatgaagaaaataattttactatttcttttaaaagtatgttttggaaaatcaatgattttaatgcatagcagtatgtttgaaaaatagaccattctaaaaagcccatgataccttactgttgatgaaaaaggatgatcatatatatagaacttgattagtcagagcattgggcattccaaaatacagcctttggttcagtagattttaatgctttaaatagactgacgtcgcatacccttatagaattggaatatgatttctcaaaaattaatttgataatttcatgtatgatgtgcatatatgctaaaagaatgcagaaaatcattttatgaatagccaaatttggggttgatgtgaacattttatgttactcatttggtttatacttttttttttttttttttaactgtgtggtttttcttttcagaagtatttaggcaatattgcacgtgagtttcagttctttttttcttttttttgagatggagtctcactcttgtcacccaggctggagtgcagtagtgcgatctcagctcactgcaacctctgcctcctggattcaagcgattctcctgtcccagcctcccaggtagctgggactataggcacgtgccaccacacccggctaattttttgtatttttagtagagacagcgtttcaccatgttagctaggatggtctagatctcctgaccttgtgatctgcctgcctcggcctcccaaagtgctgggattacaggcgtgagtcactgcgcctggccaagtttcagttctatatgaagtatttgatgttttgtttgaaacaatacagcattaaagaaccaatgttattcactaatatcattcatctttcagtttggatgatttggtttgctgcatctaggtcggtgtttgatcatctgaaaaaacatttcagtgggaagaaatgcataaaatgcctataagaagtagaaagtcattgaactgacagtgtttgatgcaactaaaagaggattgtaagcatagctttctgcaaacttgtctttaatgcacaaagctgtagtggtgaattaactatctccttattgattctctcctgtacccagatgcaaaaagtgctaagtttctcttgtcctcgtaataccatttggattttatttctgaatttaaatagtaaaatatttatgatgctgatctttaacccacctaaaattttatagtgaaacctgctttatattgttgttctgaagcttacaattgacctatacattgcattcagcaagctcctgaatttagaactgccgtcagtgtagtgtatgctgtgttccatgttgcctttttagatggctttctaccccctgaacaataaataggatgaggttttactgtaattgggtaaagtttactcttggacattatttcgatgctaaagtaaggattctgtggatgttacttaaagagaaaagcataagagcatgaagcatatctgggaatatcttttgcctttaagacgattcattcttgtctagagggaaaatctggctgatttgggaataaaatataatcgaatattcaacaccatgaagataaatcttattttggaaatctactgaccttaataccccaagcttgccctgaatactttgattggaattggaatatatcaaaaaaggttagtatttttgttgtagttaggatactaaaaggatattagttacccaagagatccaatttgtttttctgatgaatagtgttcagtaaaatgaagcagtcttaagagtgactaataatttcaaagtgatttttcgtctattcttaatattttttaattatttatttttaagagttttataccttgagcagatacaatgatctgctttagtgagaggacaatttctgattgattgttttctcttcaggccatctcacctcttcattctcttgttacatttgaagcagttgatataatgggtttatactttaaaagatagacatggtgccatgaagttggggagttgggtgaattatcccattctagttacagaggagctttccttaaatgccctttaacttctaggttttgttcaagaagttcattttctgagtaaaagttattttcatatatgttgggggaaaattaactcatctaaaaagaatcttattaggtatttgaactctaaaactaacagataagacagatatgtaccttattagagcaccagaactaatttgctaagtcttttgtttagtcctgcaagactgatgcttaatacacagtctgttctcctgtgtctaggtcaggaactccagtttgcttttctgttttgtgtcctggtagcagctgttgagtaactttcattggaggttgggaaggaagtgaggagaaagtgttcttgtttagtgttttatttcctataataggatgctgcctaacccagttcatctctatgtcctgttcactgaatattccgggtaattgaaagaaaatataatggatgggctccattaaaaccagctcaaaaataaattcttgtcagtaaagatttcttgtcaagatgtcttggattgcacttttgttgaggaaagacagtgtaaatagttaaagaatgttgataaaattgaaacatttggttgtggaattgtgtgtggttttagagggtttctgtttgtgaaatgtatgtattaaaaataataaaattccagaaactaaaaaaaaaaaaaaaaaaaaaaa

SEQ ID NO: 385 - DNA, 1823 bp, Homo sapiens
ccttttctattcctggaaaccacaaaaagtgtgtcggcttcgagatcttcttcgccttttctttcttttctttttttccctcctctctttccctctcctttcctggcgagggtgactaggagccggcgaatccgcgtttttttctctctctccctccctttccccctccccaccccctccccaacagcccccaactatagcctccgccgccgccgccgcctcaaaattcaataaaatgagctcttatttcgtcaactcactgttctccaaatacaaaaccggggagtccctgcgccccaattattatgactgcggcttcgcccaggacctgggcggccgacccaccgtggtgtacggtcccagcagcggcggcagcttccagcacccgtcgcaaatccaggagttctaccacgggccgtcgtcgctgtccacggctccctaccagcagaacccgtgcgccgtggcgtgccacggggaccccggcaatttctacggctacgacccgctgcaacgccagagcctattcggtgcgcaggatccagacctggtgcagtacgcagactgcaagcttgccgccgccagcggcctgggcgaggaggccgagggctccgagcagagcccgtcgcccacacagctcttcccctggatgcgcccgcaagcagccgccggacgcaggcgaggccgacagacctacagccgctaccagaccctggagctggagaaggagttcctatttaatccctatctgactcgtaagcggcgaatcgaggtatcgcacgccctgggactgacagagagacaggtcaaaatctggttccagaaccggaggatgaagtggaaaaaagagaacaacaaagacaagttccccagcagcaaatgcgagcaggaggagctggagaaacagaagctggagcgggccccagaggcggcggacgagggcgacgcgcagaagggcgacaagaagtaggcttcagctgggactgccagggccgcggccgcccgcacgtccgcgggtcccggccgcgccgccgccgcgcgcccctgcccgagagagctctggccccgctagcggggccaggagccgggcctcccaccgcagcgtcccccgccgcgccagtccccgctagtggtagtatctcgtaatagcttctgtgtgtgagctaccgtggatctccttcccttctcttgggggccggggggaaagaaaaggatttaagcaaaggctccctcgccctgtgagggcgagcggcaaaggcccggctgagccccccatgcccctcccctccccgtgtaaaaagcctccttgtgcaattgtcttttttttcctttgaacgtgcttctttgtaatgaccaaggtaccgatttctgctaagttctcccaacaacatgaaactgcctattcacgccgtaattctttctgtctcccttctctctctctctctcgctcgctcgctctcgctctcgctctctctcgctgcgtcctcatttcccctcccaatcctctctcccctctgcaaccccccagctcgctggctttctctctggcttctctcttttcctcctccacccaccccctttggtttgacaattttgtcttaagtgtttctcaaaagaggttactttagttagcatgcgcgctgtgggcaattgttacaagtgttcttaggtttactgtgaagagaatgtattctgtatccgtgaattgctttatgggggggagggagggctaattatatattttgttgttcctctatactttgttctgttgtctgcgcctgaaaagggcggaagagttacaataaagtttacaagcgagaacccga

SEQ ID NO: 386 - DNA, 2864 bp, Homo sapiens
cctggcgaaagcaagacgtggaggttttaccaggggttagtagcttcctcttgctaactttttattgggacaaaaggcaagatggcaccattctgttctcagatatttgtctaaataaagcccttttaattttattttatttttgttgtgggattcttaagcagataagaagaaaagacaccttcctagtgagcagctgcccagctcctgctcagttttgcctcggggtagcacctccagccacagaaagcaagccggtaagtctctccaggtaggacttgctgcaacccagctgctggactgatctgaaacgggactttgcatactctccgaagtatggtgagttggtgctgacttcaaagttgcctggtgaaggaagataaggtggatcgcagagactaaggggagagggagaagccctgctcctcttctccccaccaaggcacaatgagcaacatctgtcagaggctctgggagtacctagaaccctatctcccctgtttgtccacggaggcagacaagtcaaccgtgattgaaaatccaggggccctttgctctccccagtcacagaggcatggccactactttgtggctttgtttgattaccaggctcggactgctgaggacttgagcttccgagcaggtgacaaacttcaagttctggacactttgcatgagggctggtggtttgccagacacttggagaaaagacgagatggctccagtcagcaactacaaggctatattccttctaactacgtggctgaggacagaagcctacaggcagagccgtggttctttggagcaatcggaagatcagatgcagagaaacaactattatattcagaaaacaagaccggttcctttctaatcagagaaagtgaaagccaaaaaggagaattctctctttcagttttagatggagcagttgtaaaacactacagaattaaaagactggatgaagggggattttttctcacgcgaagaagaatcttttcaacactgaacgaatttgtgagccactacaccaagacaagtgacggcctgtgtgtcaagctggggaaaccatgcttaaagatccaggtcccagctccatttgatttgtcgtataaaaccgtggaccaatgggagatagaccgcaactccatacagcttctgaagcgattgggatctggtcagtttggcgaagtatgggaaggtctgtggaacaataccactccagtagcagtgaaaacattaaaaccaggttcaatggatccaaatgacttcctgagggaggcacagataatgaagaacctaagacatccaaagcttatccagctttatgctgtttgcactttagaagatccaatttatattattacagagttgatgagacatggaagtctgcaagaatatctccaaaatgacactggatcaaaaatccatctgactcaacaggtagacatggcggcacaggttgcctctggaatggcctatctggagtctcggaactacattcacagagatctggctgccagaaatgtcctcgttggtgaacataatatctacaaagtagcagattttggacttgccagagtttttaaggtagataatgaagacatctatgaatctagacacgaaataaagctgccggtgaagtggactgcgcccgaagccattcgtagtaataaattcagcattaagtccgatgtatggtcatttggaatccttctttatgaaatcattacttatggcaaaatgccttacagtggtatgacaggtgcccaggtaatccagatgttggctcaaaactatagacttccgcaaccatccaactgtccacagcaattttacaacatcatgttggagtgctggaatgcagagcctaaggaacgacctacatttgagacactgcgttggaaacttgaagactattttgaaacagactcttcatattcagatgcaaataacttcataagatgaacactggagaagaatatcaaataataaagtagcaaaacaaattcaaataatccattccaaaatacaatgttatcaaccaactgcacaatcagtttatcctgacatattcaagtgataggataaagttggccatgtattatgaaaaagattatttgtgcattttattgactgggcaacactgcaggacagtcaaggtgatatataatttcctcactgcctggtaaaattaagcacactaaaccaagttatttttctttttaagagatacttacatttccatttattgtttgaaatgtcgatcaagagaatcaacagatgatagtccaatttttactcagtgactgttgtagcattttcctgtttactgattagagtggttattcattattcctcagattgctgaatcccatcaggctgttattatgaaggaatttgattgctttgctgcacagcaggacctgtgctttgagatttttttttctcttttaaaatatcctgtaactacaatgatggtaaagccatgttaaatgacttgattgtacttggagtaattgcacatttttttctatgcataaaaaaatgatgcagctgttgagaaaacgaagtctttttcattttgcagaaggaaatgatggaatttttctgtacttcagtatgtgtcaactgagagtcatatacattagttttaatctcttaatattgagaatcaggttgcaaaacggatgagttattatctatggaaatgtgagaaatgtctaatagcccataaagtctgagaaataggtatcaaaatagtttaggaaaatgagaggagaacagtaggattgctgtggcctagacttctgagtaattaataaagaaaaagaagtaccctttggcctacaaaaaaaaaaaaaaaa

SEQ ID NO: 387 - DNA, 1793 bp, Homo sapiens
gttgagtcaatgtgtccccctcttgttcctagggtgcgggcttcatggccttctcctccaggaagctccacctgatcatgtcctgggtggatatccagcccccatagttcagggcctactagcagctgctagatcttgaactccaggagcgccccacgccttgggagcttggcatgggctaaatactcccccatttgttaaatggggtcctgaaacctgaccagggaagacgggataaagtagccatgggtcatcgcagcccctttgaagccgggcctggccacccaaaggcaactcaggggtggagactgaggcctcaggagaagcccccactagaatgctctctgcccctcccttccagattaaccaaaacctgctaattgtggaagccctcggcatgctcccctcccccacagcctcttcctcccttccctcccctcccccttccatccgaatgataaaggccccagcccgcctgccccagcccggcctcaggtcccggccctgccttctacactgccccaccgccctgcaccctccacccggccaggcccctgcccacgctgtctaccgtcccgcatggggccctgcagcggctcccgcctggggcccccagaggcagagtcgccctcccagccccctaagaggaggaagaagaggtacctgcgacatgacaagcccccctacacctacttggccatgatcgccttggtgattcaggccgctccctcccgcagactgaagctggcccagatcatccgtcaggtccaggccgtgttccccttcttcagggaagactacgagggctggaaagactccattcgccacaacctttcctccaaccgatgcttccgcaaggtgcccaaggaccctgcaaagccccaggccaagggcaacttctgggcggtcgacgtgagcctgatcccagctgaggcgctccggctgcagaacaccgccctgtgccggcgctggcagaacggaggtgcgcgtggagccttcgccaaggacctgggcccctacgtgctgcacggccggccataccggccgcccagtcccccgccaccacccagtgagggcttcagcatcaagtccctgctaggagggtccggggagggggcaccctggccggggctagctccacagagcagcccagttcctgcaggcacagggaacagtggggaggaggcggtgcccaccccaccccttccctcttctgagaggcctctgtggcccctctgcccccttcctggccccacgagagtggagggggagactgtgcaggggggagccatcgggccctcaaccctctccccagagcctagggcctggcctctccacttactgcagggcaccgcagttcctgggggacggtccagcgggggacacagggcctccctctgggggcagctgcccacctcctacttgcctatctacactcccaatgtggtaatgcccttggcaccaccacccacctcctgtccccagtgtccgtcaaccagccctgcctactggggggtggcccctgaaacccgagggcccccagggctgctctgcgatctagacgccctcttccaaggggtgccacccaacaaaagcatctacgacgtttgggtcagccaccctcgggacctggcggcccctggcccaggctggctgctctcctggtgcagcctgtgaggctcttaagacaggggccgctcctccctcccgctcccacccccaccttgttgacagggagcaagggaggcggctgtctgcgacacagcagctcgaaaaccaggcagagcttgttg

SEQ ID NO: 388 - DNA, 10806 bp, Homo sapiens
gggctggggtacagacgccgtccagaaatacttaaaaataaatgtttatactaacacaaactagcagccattcccctacaacctggagtactttttaacccaatctgtttgggattgagggcgggactccagggtccctgggaggccccggcagccgcgcatgctcagagcacagggaccgctccacctcgtccgtggccctgcccacccaggccgcaagagctgccgggacggtccccatcttcttggagcgctttaggctggccggcggcgctgggaggtggagtcgttgctgttgctgtttgtgagcctgtggcgcggcttctgtgggccggaaccttaaaggtgagtaactctcggtggctaatgagaagctacaaaagggtccgctttgctggtgcgcgactgcgcgtttccgttctttactgcttctcgcggcgtccgtccgcccctcgccttcctcacgttcaggccgagcgccgcgtgggccgcagccggaggcggcggagccgagggggcgcgggcggcggcgaggctgcccccgcgaggaatgcgggatcctggggttccccgcacgtggctggtgcccaggcagttccgcggttgcttagagacgggactgtggctgccctcatccccattgcgtctttttttttttttttttttttttacctccaccgccttctagtctcaccgaaggcttgtggccatctctgtaaagtttctggggaggtgggcacggggtaaacgccggagggttctgtggagcctatgggactgactggaggccaaagaactttgggccgcagatgtacaccagcgtcactcttttggtctgttagggccttcatcgctcacatcaggtttcagtgtgaaacgggaaaacgtgggtaatatttcatttacagtcgtacattctggaaaagtatctgatgaaacgcagttccaaaattaggccaaataggttttgcagggtctaaatagttattttatttcatcgtttgctttgtagggggccctagatcacggtagtaacttaggagtgtagattgtgatagacaagacaatgcataaaattgagtaatttctctagggggatgtggatcacacagtaccccgttgcaagtgcttcctatgtgtatccatggtatcgaatgcaattgcagtgtgtcaggggatgcttccaggaagtgtacctacatcagttcataactagagtcaactaatggcaatattctcgatgatttgttcacataacttttgtacagttgggatgactgggtggcttagtagagtcctggaggcaagtactttgtaagtagaagacttggtttgtaatttctagcaaactaatagcacagcttccttttttcattgcagtgctaatgtcaggaatacgaaacaggaaactggctatccaatgtattagtaaattagtaggcatactccccagtttaatgttgtgttagtatgaccacattctcccatttttgttttcgtatgttccttagcatagagtatctaaggaactgtaacatttttcaccttaaagttatgatgtctaacttggtaacaaggtttgggtaagtcagttgtgactacattttaaaagaaatgaggccgggcgcggtggctcacgcctgtaatcccagcactttgggaggccgaggcgggtggatcgccagaggtcaggagttcaagaccagcctgaccaacatggtgaaaccccgtctctactaaaaatacaaaaattagtcagccgcagccgtggtggtgggcgcctgtaatcccagctactcaggaggcgaaggcggaatcgctggaacctgggaggcagaggttgcagtgagccgagatcgcaccattgcactccagcctgggcaacaaaagcgagactccgtctcaaaaaaaaaaaaaaaaaaaaaaaaaagaggtgaacccataccaaacaaatgcacagagagccatggtaatatacagatagatagttatctgtttaaaactggaaatggttggtaagtgattggagtttttttccctaaagcttgcttgaccagctaagtgaagataaacagtttcttgttatagaagatggggtagtgatttactgaaagacaagttttttatagtttttagattttttcatcacttattccaaagtgttgctttgttgagatatttgagaactgagtaaagaaactgaacccgtgaaaatagaaattcttgattttttaagaaaacgggatattaatactttgtaaacattatctttctattcttgagttttatataaaaaataactttatgctaatttgggaaattttacagatagccgcaatggctgaaaatggtgataatgaaaagatggctgccctggaggccaaaatctgtcatcaaattgaggtatgattcctgtgctataaactgcaaaaacaagttccttgaaagaaaatacagaaagaacatttaattctagtactaggacatattcaacatttggtttgcctttgattcttagatgaacatataatagcatacagttttatattggtggagccaggttgtgaaacttaagatgtacaaacatttcaaaaggtaacactataaactagagttacttaatctttttaaaattttagtttcatagtctcatataaaaattttagcttcatagtctcatataaaatgagaataatagtagttccctcctcataaggtagtttggaggattagtgaatataatgttaagtacttagagaattcttgacaaaatttgtttgtcttttactttttatgttacttctggcattccaaatagtcatacttgggtttttccttggcttgtatattgagagttcctctatgcttaaatttgagaaacatttactttaactttttttttttttttttttttttgaggcagcgtcttactttgttgcccaggctggagtacagtggcacaattatgcctcactgcagcttcaacctgccaggcttaagcaatcctcccacttcagcttcctgagctgggactagaggcacgtacctctatttcttatttattttatttatttatttattttttggagagctggggtcttgccatgttgcccaagctggtcttgaactcctagactcaagcaatgcacccacctcagcctcctaaagtgctgggattaggcatgaaccaccactcctggccccccacccccttttttgagatggagtctcactcttttgtcaggctggaatgcagtggcacaatcttggctcactgcagcctctgcctcccggtttcaaatgattcttctgccccagccccctgagtagctgggactacaggtgtgtgccactatgtgcagctaatttttgtatttttagtagagacggggtttgaccatgtcggccagggtggtctcaatctcttgacctcccaaagtgcagggatacaggcgtgcggcaccgtgcctggcccctgtcccttattttttaattttaaaaaattagaagggcaggtgtggtggctcatgcctgcaatcccagcactttgggaggccgaggtgggcagatcgcttgagatcaggagttcaaggccaacatggtaaaaccctgtctctactaaaaataacaaaaatttgctgggcgtggtggtacatgcctgtaatcccagctactcaggaggctgaggcaggagaatcacttgaacctgggaagcggaggttgcggcaagctgagttcatgccactgcactccagcctgagcgacagagtaagactctgtctcaaaaaaaaataagaattgagtgattaaccaatttcttccagttctttttatttaaccatctgttctttccacactgatttgcaagagccttttcatataatctttaaatatattcttctttaaggttttctagtctattgacacatctgttacactattttagtaattgacattttagttttatctttttgctaatttgtaaacattattgtatatttggggaaagtgttttgccttttgtaacttatgtatttttaaataacagaacttggtactgtagagtaatgtcaggattggagtccatattatacagtgttctgaaatacattgtaattatctcacagtattattttggcgacttcaatttgccacgggacaagtttctaaaggaacagataaaactggatgaaggctgggtacctttggagataatgataaaattcaacaggtaacaagcttttaaaaataatctttaggttttctgtttacaatgagtgctactgctgagtcttatgtttttatatgtactcttcaggttgaaccgtctaacaacagactttaatgtaattgtggaagcattgagcaaatccaaggcagaactcatggaaatcagtgaagataaaactaaaatcagaaggtctccaagcaaacccctacctgaagtgactgatgagtataaaaatgatgtaaaaaacagatctgtttatattgtaagtgggcctgtaatgcatttaaatatcttacatttatttagaaagtaaagtacggaagaataagggctcaggaatcacagcctcactaattactgtatgtcctttcgtaatattcttaacctaagtttcttttgttttgttttgttttgagacagtctcatcctgttgctcacgttggagtgcagtggtgtgatcatggcccactgcagtcttgacctcctgggctcaagtgatcctcccacctcagcctcctgagtagctgggactacaggtgcatgctaccatgcctggcaaaaaattttttgtagagacggtcttcctgtgttgcccaggctggtgtcaatctcctgggctctagtgatccaatcaccttgacctcccaaagtgctgggattacaggtgtgagccaccatgcctagtcctaagttttatcttcataaacgtggatattttctaccttgtagaactgttgtgagaattaaatgaaaaaaaatatatataccattggatgaaatctttgacatattctaagcacctattgcctattagctgttcttatttatcagcagctaaacttgattgcagttttctttagtgtatttttaaatagttttttattacggaaaatttcagatacatatataaatagattcaataatgtaccatcaccagctttagtagttaataacagaacatgcaaatcatcttgttttatttctgcttcaactgaattattttgaagcaaataccagatgaatcacttttattgtactggagagtagtggctcctaaacaaggctgttaagtgattaacaaagagaaatagagatagataggtatatcctgggttcatttcaagaaaaaatgaatcaaattctctccaattgtttatctgagaagtcattatttgttatttgtacatttcttcccactcttcacagaaaggcttcccaactgatgcaactcttgatgacataaaagaatggttagaagataaaggtcaagtactaaatattcagatgagaagaacattgcataaagcatttaaggtatgataatacagactttttctagttttaaaatatatgggacataacttaaaaaaatattttccttcctttttacagggatcaatttttgttgtgtttgatagcattgaatctgctaagaaatttgtagagacccctggccagaagtacaaagaaacagacctgctaatacttttcaagtaagtctttttgctgatgtttctcctggccttttacttatatggacacacactagggtaaggagcatggaagtagtatcccctgaaaggccaatattcttagtatctttagatgacctttgagaaatgcttgatatttgttcagtgagaactatagtcttttgagactataagaaaagtgttcattagtaccttttcactgttaacaatttttttttgtttttcttttttttttgagacaagtttcactcttgtcacccaggctggagtgcagtggtgtgatcttggctccctgcaacctctgcttcctgggttcaagcgattctcctgccccagcctcctgagtagctgggactacaggcgcgtgccacctcgtccacctaatttttgtatttttagtagagatggagtttcaccatgttggccaggctggtcttgaactcctgacttcagatcatccgcctgctttggcctcccaaagtgttgggactacaggcgtagacgctgcgccccagccactgttagccattattaaaggaggttatgttttaatactgattttgcatctaaaacttttgatcaggctgggtattaaaatttggtcttttgtgtgtttggaaaatatatcaatgcagttttcatcttatttttcatagcctatatgtcttttttttttttttttttttttttttttacagtacaaaggatttgagatttgggtcacattctttgtgaatgtgtgtctaagtgtctaaaaatggggatgaaccagagcattttcatgataaaattaggtgtagggccatagttccctactttagaagactgtgcattagtcttctaaatggtatatactaaacttgattgacttagagatgcactgtgatgggtcatagtatcagtgttaaatcctcaaaaattatttaacatgattttcatatgttattgttggatcttggggattttagaattttctccttttgtggaattaacactatagaaaactgcaatattatttgcatgacttctgatacacttttttccctatacatgaatgataaatggaaatcaacatgaaattgctaatggatagggggtttctttttggggtcatgaaaatgttctgaaattagtagtgatggttgtacaactgaatatactaaaaaacattcaaggtacactttaaaagagtgaattttgtggcacatggattttttcctcagtaaagctgttatataaaaaaacatgagagagtaaattccttggcatattttgaatttttagttgatgattatgttgatagtaagcgtgtgcaacattcattgctgtgccatgtcttaagttattcataataatctgcagtcttaactttgttctcgtgaacttagcctctgtactgtgtgttctttagggacgattactttgccaaaaaaaatgaagaaagaaaacaaaataaagtggaagctaaattaagagctaaacagtaagtatgttgaactaatcacgacataatttgaattccttaaaactctgacagaaatatagctggtgagctctgaaatagtggcagtagacctttctctttgctagtgaaacactgagatcttaagctgccttgacaatctcagggccaaattgcattgcagtctagcattggacgatcaaaaaaacctaaggacttctggctttggttaagtaagtttagtgatcatgattggttaactttattaggacttaattttcttatatagtaaatagaagtatgttataattatatttttatttgtagggagcaagaagcaaaacaaaagttagaagaagatgctgaaatggtaagtatatattactgctatctagtacatctgtaattcgaagttaaatgaatagcttttaagtctgaggactttttcaagaaaatacgtaagcaaagctatctatagttgttattgcattaagtaatacatcaggtattatattgagggaaaagagaaaactaaggataggaaatatgttctaaaatatggaaaaggccgggtgcagtggcccacgcctgtaatcccagcactttggaaggccgaggcgggcagatcagttgaggcacggagttcgagaccagcctggccaatatggtgaaaccccatcttgactaaaaatacaaaaattagccaggcgtggtggtgcatgcctgtaatcccagctatgtgggaggctgaggcaggagaatcacttgaacccaggaggcggaggttgcagtgaaccaagatcatgccactgcactccagcctgggtgacagagtgagaccctgtttaaaaataaaaaatataataaaacacaggaaaatatattttgaaatattcagaaaaagttcatttatgcctagaacttatttttatgagaaaatgtcctataacttctaaagattctaatcataggttaatactaacatgacttttatttttgacttaataagatactgatgtgtatttccatttagaaagttacaggtaaaaatttttatttggggaaaataatgactataaatttttttttttctttttttgagaccgagtctcactgttgcccaggctggagtgcagtggcgcgatctcggctcactgcaagctccacctcccagattcatgccattcttctgcctcagcctcccgagtagctgggactacaggcgcctgcaccacgtcggctaattttttgtatttttttttagcagagacggggtttcaccatgttagctaggatgctctcgatctcttgacctggtgatccgcctgcctcggcctcccaaagtgctgggattacaggtgtcagccactgcgcccggcctaaaaattttttaaagtatgataaatactgcctagaattattttccaagatagtttaatagccagatttatgtagtttataactaattaataccagttgtataagagatcaatatatgaaagccatttggaataaaggatgacaaaggaaacaccaacactatgaaactactttatttatttattattattattattttttgagatggagtttcgctcttgctgccccggcggaagaaactactttaaaatagcattttggtttctagtctttttcttgtatagctataaggtggtgtgagtcatttctggtctgttgctgcttttaagaaactttttgatcactttgtatatttttatagaaatctctagaagaaaagattggatgcttgctgaaattttcgggtgatttagatgatcagacctgtagagaagatttacacatacttttctcaaatcatggtgaaataaaatggatagacttcgtcagaggagcaaaagaggtcagaggagcaaaagaggtttggatacatccctatcctttttagcaatcagtttgaaaatctgtagaaacttagacaaaattagtagaaagtaattttaaaaattgtgtttattaaattagtttctacttgatcatttgttattgccactagatgtgatgtctgatattttctgaattatactaaattagtttctacttgatcatttactttgttgttattgtcactatatgtgatgtctgatagtttctgaattatactatgaataactgttcatactgatgattgcagttttacttctgtagcattccttttctactgttcagtaaaattcattcaaactggtaaagacatggaaggtttgcagggtagaaaaaattactttggacaaagaaattaattgtgggactaaaaaccaagggtatggcttttgttttctgtctctggtataggggataattctatttaaagaaaaagccaaggaagcattgggtaaagccaaagatgcaaataatggtaacctacaattaaggaacaaagaagtgacttgggaagtactagaaggagaggtggaaaaagaagcactgaagaaaataatagaagaccaacaagaatccctaaacaaatggaagtcaaaaggtcgtagatttaaaggaaaaggaaagggtaataaagctgcccagcctgggtctggtaaaggaaaagtacagtttcagggcaagaaaacgaaatttgctagtgatgatgaacatgatgaacatgatgaaaatggtgcaactggtaagttttttttaagtcctttggtagtttcatgagaaaatttctacttccataaataaatgatttgccagagagaatagggatttggcttttcaactcctgtataagtgccattcttggattattaacgatttacctcggttatgctgttgtatargtcagggacaggatatttggaagatgaatctagaggtcaggtctgtactaagagaaaagccttttctcattggtgcaaggaagttgttgcatctttttcaacagtatcattattaataattgtgctcagtattaaactagagcagtacttacgttgaatttaacaaaaattaattgttacgttataggacctgtgaaaagagcaagagaagaaacagacaaagaagaacctgcatccaaacaacagaaaacagaaaatggtgctggagaccagtagtttagtaaaccaattttttattcattttaaataggttttaaacgacttttgtttgcggggcttttaaaaggaaaaccgaattaggtccacttcaatgtccacctgtgagaaaggaaaaatttttttgttgtttaacttgtctttttgttatgcaaatgagatttctttgaatgtattgttctgtttgtgttatttcagatgattcaaatatcaaaaggaagattcttccattaaattgcctttgtaatatgagaatgtattagtacaaactaactaataaaatatatactatatgaaaagagcaaaaacagtttttgattttttttttctttttgtacccaaagcatttaggaaagaactagaatattagctattgacgatgggcctttcccacaggccatttatggtgtctcctaggctggctttgtatatttacacaggaaagttggtaacactagaaataattactgtcacaaagctttcccttttttttcttttcgagactgagtctcactcytatcgcgc

SEQ ID NO: 389 - DNA, 2524 bp, Homo sapiens
attggctgaaggcacttccgttgagcatctagacgtttccttggctcttctggcgccaaaatgtcgttcgtggcaggggttattcggcggctggacgagacagtggtgaaccgcatcgcggcgggggaagttatccagcggccagctaatgctatcaaagagatgattgagaactgtttagatgcaaaatccacaagtattcaagtgattgttaaagagggaggcctgaagttgattcagatccaagacaatggcaccgggatcaggaaagaagatctggatattgtatgtgaaaggttcactactagtaaactgcagtcctttgaggatttagccagtatttctacctatggctttcgaggtgaggctttggccagcataagccatgtggctcatgttactattacaacgaaaacagctgatggaaagtgtgcatacagagcaagttactcagatggaaaactgaaagcccctcctaaaccatgtgctggcaatcaagggacccagatcacggtggaggaccttttttacaacatagccacgaggagaaaagctttaaaaaatccaagtgaagaatatgggaaaattttggaagttgttggcaggtattcagtacacaatgcaggcattagtttctcagttaaaaaacaaggagagacagtagctgatgttaggacactacccaatgcctcaaccgtggacaatattcgctccatctttggaaatgctgttagtcgagaactgatagaaattggatgtgaggataaaaccctagccttcaaaatgaatggttacatatccaatgcaaactactcagtgaagaagtgcatcttcttactcttcatcaaccatcgtctggtagaatcaacttccttgagaaaagccatagaaacagtgtatgcagcctatttgcccaaaaacacacacccattcctgtacctcagtttagaaatcagtccccagaatgtggatgttaatgtgcaccccacaaagcatgaagttcacttcctgcacgaggagagcatcctggagcgggtgcagcagcacatcgagagcaagctcctgggctccaattcctccaggatgtacttcacccagactttgctaccaggacttgctggcccctctggggagatggttaaatccacaacaagtctgacctcgtcttctacttctggaagtagtgataaggtctatgcccaccagatggttcgtacagattcccgggaacagaagcttgatgcatttctgcagcctctgagcaaacccctgtccagtcagccccaggccattgtcacagaggataagacagatatttctagtggcagggctaggcagcaagatgaggagatgcttgaactcccagcccctgctgaagtggctgccaaaaatcagagcttggagggggatacaacaaaggggacttcagaaatgtcagagaagagaggacctacttccagcaaccccagaaagagacatcgggaagattctgatgtggaaatggtggaagatgattcccgaaaggaaatgactgcagcttgtaccccccggagaaggatcattaacctcactagtgttttgagtctccaggaagaaattaatgagcagggacatgaggttctccgggagatgttgcataaccactccttcgtgggctgtgtgaatcctcagtgggccttggcacagcatcaaaccaagttataccttctcaacaccaccaagcttagtgaagaactgttctaccagatactcatttatgattttgccaattttggtgttctcaggttatcggagccagcaccgctctttgaccttgccatgcttgccttagatagtccagagagtggctggacagaggaagatggtcccaaagaaggacttgctgaatacattgttgagtttctgaagaagaaggctgagatgcttgcagactatttctctttggaaattgatgaggaagggaacctgattggattaccccttctgattgacaactatgtgccccctttggagggactgcctatcttcattcttcgactagccactgaggtgaattgggacgaagaaaaggaatgttttgaaagcctcagtaaagaatgcgctatgttctattccatccggaagcagtacatatctgaggagtcgaccctctcaggccagcagagtgaagtgcctggctccattccaaactcctggaagtggactgtggaacacattgtctataaagccttgcgctcacacattctgcctcctaaacatttcacagaagatggaaatatcctgcagcttgctaacctgcctgatctatacaaagtctttgagaggtgttaaatatggttatttatgcactgtgggatgtgttcttctttctctgtattccgatacaaagtgttgtatcaaagtgtgatatacaaagtgtaccaacataagtgttggtagcacttaagacttatacttgccttctgatagtattcctttatacacagtggattgattataaataaatagatgtgtcttaacataa

SEQ ID NO: 390 - DNA, 1959 bp, Homo sapiens
ctccgccactccggtaggattccccgcctgtcattccctagcccagctcttgggaaactgcagaggggtccagaggatttgcagttctgaacctgcacactccagtctaggatctccgagcaagagcgtagcctcatggctacaacctgtgagattagcaacatttttagcaactacttcagtgcgatgtacagctcggaggactccaccctggcctctgttccccctgctgccacctttggggccgatgacttggtactgaccctgagcaacccccagatgtcattggagggtacagagaaggccagctggttgggggaacagccccagttctggttgaagacgcaggttctggactggatcagctaccaagtggagaagaacaagtacgacgcaagcgccattgacttctcacgatgtgacatggatggcgccaccctctgcaattgtgcccttgaggagctgcgtctggtctttgggcctctgggggaccaactccatgcccagttgcgagacctcacttccagctcttcttatgagctcagttggatcattgagctgctggagaaggatggcatggccttccaggaggccctagacccagggccctttgaccagggcagcccctttgcccaggagctgctggacgacggtcagcaagccagcccctaccaccccggcagttgtggcgcaggagccccctcccccggcagctctgacgtctccaccgcagggactggtgcttctcggagctcccactcctcagactccggtggaagtgacgtggacctggatcccactgatggcaagctcttccccagcgatggttttcgtgactgcaagaagggggatcccaagcacgggaagcggaaacgaggccggccccgaaagctgagcaaagagtgctgggactgtctcgagggcaagaagagcaagcacgcgcccagaggcacccacctgtgggagttcatccgggacatcctcatccacccggagctcaacgagggcctcatgaagtgggagaatcgacatgaaggcgtcttcaagttcctgcgctccgaggctgtggcccaactatggggccaaaagaaaaagaacagcaacatgacctacgagaagctgagccgggccatgaggtactactacaaacgggagatcctggaacgggtggatggccggcgactcgtctacaagtttggcaaaaactcaagcggctggaaggaggaagaggttctccagagtcggaactgagggttggaactatacccgggaccaaactcacggaccactcgaggcctgcaaaccttcctgggaggacaggcaggccagatggcccctccactggggaatgctcccagctgtgctgtggagagaagctgatgttttggtgtattgtcagccatcgtcctgggactcggagactatggcctcgccttcccacccttctcttggaattacaaagccctggggtttgaactgactttatagcttgcaagtgtatctccttttatctggtgcctcctcaaacccagtcttcaaacactaaatgcagacaacaccttcttctgcaaacaccctggacttgacccaaggaggccctggggaggccctaggggagcaccgtgatgagaggacagagcaggggctccagcaccttctttctggactggcgttcacctccctgctcagtgcttgggctccacgggcaggggtcagagcactccctaatttatgtgctatataaatatgtcagatgtacatagagatctattttttctaaaacattcccctccccactcctctcccacagagtgctggactgttccaggccctccagtgggctgatgctgggacccttaggatggggctcccagctcctttctcctgtgaatggaggcagagacctccaataaagtgccttctgggctttttccaaaaaaaaaaaaaaaaaaaaaaaaa

SEQ ID NO: 391 - DNA, 2627 bp, Homo sapiens
gctgacgccttcgagcgcggcccggggcccggagcggccggagcagcccgggtcctgaccccggcccggctcccgctccgggctctgccggcgggcgggcgagcgcggcgcggtccgggccggggggatgtctcggcggacgcgctgcgaggatctggatgagctgcactaccaggacacagattcagatgtgccggagcagagggatagcaagtgcaaggtcaaatggacccatgaggaggacgagcagctgagggccctggtgaggcagtttggacagcaggactggaagttcctggccagccacttccctaaccgcactgaccagcaatgccagtacaggtggctgagagttttgaatccagaccttgtcaaggggccatggaccaaagaggaagaccaaaaagtcatcgagctggttaagaagtatggcacaaagcagtggacactgattgccaagcacctgaagggccggctggggaagcagtgccgtgaacgctggcacaaccacctcaaccctgaggtgaagaagtcttgctggaccgaggaggaggaccgcatcatctgcgaggcccacaaggtgctgggcaaccgctgggccgagatcgccaagatgttgccagggaggacagacaatgctgtgaagaatcactggaactctaccatcaaaaggaaggtggacacaggaggcttcttgagcgagtccaaagactgcaagcccccagtgtacttgctgctggagctcgaggacaaggacggcctccagagtgcccagcccacggaaggccagggaagtcttctgaccaactggccctccgtccctcctaccataaaggaggaggaaaacagtgaggaggaacttgcagcagccaccacatcgaaggaacaggagcccatcggtacagatctggacgcagtgcgaacaccagagcccttggaggaattcccgaagcgtgaggaccaggaaggctccccaccagaaacgagcctgccttacaagtgggtggtggaggcagctaacctcctcatccccgctgtgggttctagcctctctgaagccctggacttgatcgagtcggaccctgatgcttggtgtgacctgagtaaatttgacctccctgaggaaccatctgcagaggacagtatcaacaacagcctagtgcagctgcaagcgtcacatcagcagcaagtcctgccaccccgccagccttccgccctggtgcccagtgtgaccgagtaccgcctggatggccacaccatctcagacctgagccggagcagccggggcgagctgatccccatctcccccagcactgaagtcgggggctctggcattggcacaccgccctctgtgctcaagcggcagaggaagaggcgtgtggctctgtcccctgtcactgagaatagcaccagtctgtccttcctggattcctgtaacagcctcacgcccaagagcacacctgttaagaccctgcccttctcgccctcccagtttctgaacttctggaacaaacaggacacattggagctggagagcccctcgctgacatccaccccagtgtgcagccagaaggtggtggtcaccacaccactgcaccgggacaagacacccctgcaccagaaacatgctgcgtttgtaaccccagatcagaagtactccatggacaacactccccacacgccaaccccgttcaagaacgccctggagaagtacggacccctgaagcccctgccacagaccccgcacctggaggaggacttgaaggaggtgctgcgttctgaggctggcatcgaactcatcatcgaggacgacatcaggcccgagaagcagaagaggaagcctgggctgcggcggagccccatcaagaaagtccggaagtctctggctcttgacattgtggatgaggatgtgaagctgatgatgtccacactgcccaagtctctatccttgccgacaactgccccttcaaactcttccagcctcaccctgtcaggtatcaaagaagacaacagcttgctcaaccagggcttcttgcaggccaagcccgagaaggcagcagtggcccagaagccccgaagccacttcacgacacctgcccctatgtccagtgcctggaagacggtggcctgcggggggaccagggaccagcttttcatgcaggagaaagcccggcagctcctgggccgcctgaagcccagccacacatctcggaccctcatcttgtcctgaggtgttgagggtgtcacgagcccattctcatgtttacaggggttgtgggggcagagggggtctgtgaatctgagagtcattcaggtgacctcctgcagggagccttctgccaccagcccctccccagactctcaggtggaggcaacagggccatgtgctgccctgttgccgagcccagctgtgggcggctcctggtgctaacaacaaagttccacttccaggtctgcctggttccctccccaaggccacagggagctccgtcagcttctcccaagcccacgtcaggcctggcctcatctcagaccctgcttaggatgggggatgtggccaggggtgctcctgtgctcaccctctcttggtgcatttttttggaagaataaaattgcctctctctttg

SEQ ID NO: 392 - DNA, 3587 bp, Homo sapiens
gaattcagcacaatgaaggagccatggaatgccaatttaacgtcagtcttgtacttgaagggaaaaaaaacacttgtaatggtggcaacagtgaagctgttcctttaacatccccaaatatagccaagtttagcactccaccagccatcctcagaaagaagagaaaaatgcgagtgggtcattccccaggcagcgaacttagggatggctcattgaacgatggtggtaatatggcgctaaaacatacaccactgaaaacactaccattttctccttcacagtttttcaacacatgtcctggtaatgaacaacttaatatagaaaatccttcatttacatcaacccctatttgtgggcagaaagctctcattacaactcctcttcataaggaaacaactcccaaagatcaaaaggaaaatgtagggtttagaacacctactattagaagatctatactgggtaccacaccaagaactcctactccttttaagaatgcgcttgctgctcaggagaaaaaatatggacctcttaaaattgtgtcccagccacttgctttcttggaagaagatattcgggaagttttaaaagaagaaactggaacagacctattcctcaaagaggaagatgaacctgcttacaaaagctgcaaacaagagaataccgcttctgggaagaaagtcagaaaatcactagtcttagataattgggaaaaagaagaatcaggcactcaactgttgactgaagacatttcagacatgcagtcagaaaatagatttactacatccttattaatgataccattattggaaatacatgacaataggtgcaacttgattcctgaaaaacaagatataaattcaaccaacaaaacatatacacttactaaaaagaaaccaaaccctaacacttccaaagttgtcaaattggaaaagaatcttcagtcaaattgtgaatgggaaacagtggtttatgggaagacagaagaccaacttattatgactgaacaagcaagaagatatctgagtacttacacagctaccagtagtacttcaagagctctcatactgtaattgttattaaaattgatgaaatgccccactcccttactgcagtctctactaaattaggttgcagtgaaatttttctcaattagttgtttttaaagttgtaagatacccttttaatacagcatcttttttctattctatatagtaggcagaaagctagtaagtcacttaaggggtagatagtttcatagtttattttttaagagatgagatttttaaaaattgtttttaaagaacaagatgggaaaataatagaatgttcatggatttctaaaagtaaattctcatatattttcttcacaagatatatgttgctactctcttgatgctgcagttttgttatagataggtgtatgagtatatatgatttctgaaattagtctatgtatggaaagcacacatgattttatgaaggtacttttgcccatgtgctgatttacttaggctaccatttacaaagaaacacattgaaaaggaatttaaaggaaggatagaaagttgcactactaattttttgttttttttttcagaagcagtaaaattaactacagtgttaaatgtatttatttgagcatagtactgaaaacaaaaagcattcaaaaaagagttttttctttattagtaaatagtattttcttaatctcagaggagctgagagttttgttgaatgtattgtacagtatgtaggagcaggagaactttgtaaattggaaagaagtctgtttttataatttatttttatttttaaagcttaaatgtagatatttatagtatacagggagcctagaagccaatgttgtttcctgttattacagctaacacagtaaagaataattttgactttaagtatgaaacagtagtaagttatagctgcaaagaatacaatatctatactgtatgtcacatctacctaaatgttgcactatgccctttaaatcatgctggttataaagtagttctaaaaatgtactaaataataatttaatattttctttttaaattatatcgggggtggtcatatacattaatctggtgatttgtatatgtgtttgaaattttttgcttttgtttaaaaaaaaataatatggtaccttggtccctaaaaacagtctgcacttagaagttatatttactcagtgtttcagaagtggagaacttatcttttatttataaaaatattttgtccttttttaaatgttttgtgtttctctacaggttacaacagttgcttcagttgcctgttttaggtgtttgcacttattttatttcttcttgaaagaatttttatttgcttttgtggtagagattatatgtaattttttttcagtcatataatggtgtgctgtcaacttaaacactgacaggtaaatagaattgtacactgtagtttgaattatttataattgacacactctctccctctccactcctgaagtatgctgctatagaaaatagcagaatcggcttgctgctacgagagaaggaaagagcgaccaccacttgcactgtgtgaaaagataaaaaacaaatgatggcaagttctcaagttaactaaatggaatcaaccattaccaggcaaattcttgcaaataccaaaatactactatgccttataaaacaaaatgaaagcaggttaagattttctgctctgtttgtatgttaatagaaatggaaatactaagtattttaatgcttagctattgaacagtagacctaaaagggttttaagctatttaaatctacttgctagtttttgcatattttatatatatatatatttatatatatatatagtgagaagtgaagaaaatgtatggtactaagattatgccttattgataaatagataaaccaatttgaatcctcttagcatgtttaagtatgttgattgctttctaattaatgaacttctcacagaaatttcacttagtgaaaccaatgattgtagcaaactcatactggatcatttcagttaccttgaactaatagcacataatggttttttgttgttgttgtttttaatgtagcccttacctggatatacatagtctgcaatcaccaaagtataatatcttgtaaggctatattttttaaagcatattttttcttgagcattaaattatcctaaatggtaatatattgtggataagtctgggcttattggacataatacatatttgggttggtactggttgaatccttcagttaactgctttgttgctttttgcaagattttttatcttaaacatgtcaggcatcttaagtcacctttatactgttttgttcctctgagtttctttcagtatgttatacaaatgccagacataacatgtagcagccatacttgcatggaaactgactacacatacataatactgcattttattgtaaggttttcacattaatacagcaattaccctgactaaattgagttttgtgatatatggaaaacttcattgtaagagaatcttgcatacaatgttgactattaacatccaaaataaagcatctgtgtacaag

SEQ ID NO: 393 - DNA, 5896 bp, Homo sapiens
ctgcggccggcccgcgagctaggctgggtttttttttttctcccctccctcccccctttttccatgcagctgatctaaaagggaataaaaggctgcgcataatcataataataaaagaaggggagcgcgagagaaggaaagaaagccgggaggtggaagaggagggggagcgtctcaaagaagcgatcagaataataaaaggaggccgggctctttgccttctggaacgggccgctcttgaaagggcttttgaaaagtggtgttgttttccagtcgtgcatgctccaatcggcggagtatattagagccgggacgcggcggccgcaggggcagcggcgacggcagcaccggcggcagcaccagcgcgaacagcagcggcggcgtcccgagtgcccgcggcgcgcggcgcagcgatgcgttccccacggacgcgcggccggtccgggcgccccctaagcctcctgctcgccctgctctgtgccctgcgagccaaggtgtgtggggcctcgggtcagttcgagttggagatcctgtccatgcagaacgtgaacggggagctgcagaacgggaactgctgcggcggcgcccggaacccgggagaccgcaagtgcacccgcgacgagtgtgacacatacttcaaagtgtgcctcaaggagtatcagtcccgcgtcacggccggggggccctgcagcttcggctcagggtccacgcctgtcatcgggggcaacaccttcaacctcaaggccagccgcggcaacgaccgcaaccgcatcgtgctgcctttcagtttcgcctggccgaggtcctatacgttgcttgtggaggcgtgggattccagtaatgacaccgttcaacctgacagtattattgaaaaggcttctcactcgggcatgatcaaccccagccggcagtggcagacgctgaagcagaacacgggcgttgcccactttgagtatcagatccgcgtgacctgtgatgactactactatggctttggctgcaataagttctgccgccccagagatgacttctttggacactatgcctgtgaccagaatggcaacaaaacttgcatggaaggctggatgggccccgaatgtaacagagctatttgccgacaaggctgcagtcctaagcatgggtcttgcaaactcccaggtgactgcaggtgccagtatggctggcaaggcctgtactgtgataagtgcatcccacacccgggatgcgtccacggcatctgtaatgagccctggcagtgcctctgtgagaccaactggggcggccagctctgtgacaaagatctcaattactgtgggactcatcagccgtgtctcaacgggggaacttgtagcaacacaggccctgacaaatatcagtgttcctgccctgaggggtattcaggacccaactgtgaaattgctgagcacgcctgcctctctgatccctgtcacaacagaggcagctgtaaggagacctccctgggctttgagtgtgagtgttccccaggctggaccggccccacatgctctacaaacattgatgactgttctcctaataactgttcccacgggggcacctgccaggacctggttaacggatttaagtgtgtgtgccccccacagtggactgggaaaacgtgccagttagatgcaaatgaatgtgaggccaaaccttgtgtaaacgccaaatcctgtaagaatctcattgccagctactactgcgactgtcttcccggctggatgggtcagaattgtgacataaatattaatgactgccttggccagtgtcagaatgacgcctcctgtcgggatttggttaatggttatcgctgtatctgtccacctggctatgcaggcgatcactgtgagagagacatcgatgaatgtgccagcaacccctgtttgaatgggggtcactgtcagaatgaaatcaacagattccagtgtctgtgtcccactggtttctctggaaacctctgtcagctggacatcgattattgtgagcctaatccctgccagaacggtgcccagtgctacaaccgtgccagtgactatttctgcaagtgccccgaggactatgagggcaagaactgctcacacctgaaagaccactgccgcacgaccccctgtgaagtgattgacagctgcacagtggccatggcttccaacgacacacctgaaggggtgcggtatatttcctccaacgtctgtggtcctcacgggaagtgcaagagtcagtcgggaggcaaattcacctgtgactgtaacaaaggcttcacgggaacatactgccatgaaaatattaatgactgtgagagcaacccttgtagaaacggtggcacttgcatcgatggtgtcaactcctacaagtgcatctgtagtgacggctgggagggggcctactgtgaaaccaatattaatgactgcagccagaacccctgccacaatgggggcacgtgtcgcgacctggtcaatgacttctactgtgactgtaaaaatgggtggaaaggaaagacctgccactcacgtgacagtcagtgtgatgaggccacgtgcaacaacggtggcacctgctatgatgagggggatgcttttaagtgcatgtgtcctggcggctgggaaggaacaacctgtaacatagcccgaaacagtagctgcctgcccaacccctgccataatgggggcacatgtgtggtcaacggcgagtcctttacgtgcgtctgcaaggaaggctgggaggggcccatctgtgctcagaataccaatgactgcagccctcatccctgttacaacagcggcacctgtgtggatggagacaactggtaccggtgcgaatgtgccccgggttttgctgggcccgactgcagaataaacatcaatgaatgccagtcttcaccttgtgcctttggagcgacctgtgtggatgagatcaatggctaccggtgtgtctgccctccagggcacagtggtgccaagtgccaggaagtttcagggagaccttgcatcaccatggggagtgtgataccagatggggccaaatgggatgatgactgtaatacctgccagtgcctgaatggacggatcgcctgctcaaaggtctggtgtggccctcgaccttgcctgctccacaaagggcacagcgagtgccccagcgggcagagctgcatccccatcctggacgaccagtgcttcgtccacccctgcactggtgtgggcgagtgtcggtcttccagtctccagccggtgaagacaaagtgcacctctgactcctattaccaggataactgtgcgaacatcacatttacctttaacaaggagatgatgtcaccaggtcttactacggagcacatttgcagtgaattgaggaatttgaatattttgaagaatgtttccgctgaatattcaatctacatcgcttgcgagccttccccttcagcgaacaatgaaatacatgtggccatttctgctgaagatatacgggatgatgggaacccgatcaaggaaatcactgacaaaataatcgatcttgttagtaaacgtgatggaaacagctcgctgattgctgccgttgcagaagtaagagttcagaggcggcctctgaagaacagaacagatttccttgttcccttgctgagctctgtcttaactgtggcttggatctgttgcttggtgacggccttctactggtgcctgcggaagcggcggaagccgggcagccacacacactcagcctctgaggacaacaccaccaacaacgtgcgggagcagctgaaccagatcaaaaaccccattgagaaacatggggccaacacggtccccatcaaggattacgagaacaagaactccaaaatgtctaaaataaggacacacaattctgaagtagaagaggacgacatggacaaacaccagcagaaagcccggtttgccaagcagccggcgtatacgctggtagacagagaagagaagccccccaacggcacgccgacaaaacacccaaactggacaaacaaacaggacaacagagacttggaaagtgcccagagcttaaaccgaatggagtacatcgtatagcagaccgcgggcactgccgccgctaggtagagtctgagggcttgtagttctttaaactgtcgtgtcatactcgagtctgaggccgttgctgacttagaatccctgtgttaatttaagttttgacaagctggcttacactggcaatggtagtttctgtggttggctgggaaatcgagtgccgcatctcacagctatgcaaaaagctagtcaacagtaccctggttgtgtgtccccttgcagccgacacggtctcggatcaggctcccaggagcctgcccagccccctggtctttgagctcccacttctgccagatgtcctaatggtgatgcagtcttagatcatagttttatttatatttattgactcttgagttgtttttgtatattggttttatgatgacgtacaagtagttctgtatttgaaagtgcctttgcagctcagaaccacagcaacgatcacaaatgactttattatttatttttttaattgtatttttgttgttgggggaggggagactttgatgtcagcagttgctggtaaaatgaagaatttaaagaaaaaaatgtcaaaagtagaactttgtatagttatgtaaataattcttttttattaatcactgtgtatatttgatttattaacttaataatcaagagccttaaaacatcattcctttttatttatatgtatgtgtttagaattgaaggtttttgatagcattgtaagcgtatggctttatttttttgaactcttctcattacttgttgcctataagccaaaattaaggtgtttgaaaatagtttattttaaaacaataggatgggcttctgtgcccagaatactgatggaattttttttgtacgacgtcagatgtttaaaacaccttctatagcatcacttaaaacacgttttaaggactgactgaggcagtttgaggattagtttagaacaggtttttttgtttgtttgttttttgtttttctgctttagacttgaaaagagacaggcaggtgatctgctgcagagcagtaagggaacaagttgagctatgacttaacatagccaaaatgtgagtggttgaatatgattaaaaatatcaaattaattgtgtgaacttggaagcacaccaatctgactttgtaaattctgatttcttttcaccattcgtacataatactgaaccacttgtagatttgattttttttttaatctactgcatttagggagtattctaataagctagttgaatacttgaaccataaaatgtccagtaagatcactgtttagatttgccatagagtacactgcctgccttaagtgaggaaatcaaagtgctattacgaagttcaagatcaaaaaggcttataaaacagagtaatcttgttggttcaccattgagaccgtgaagatactttgtattgtcctattagtgttatatgaacatacaaatgcatctttgatgtgttgttcttggcaataaattttgaaaagtaatatttattaaatttttttgtatgaaaacatggaacagtgtggctcttctgagcttacgtagttctaccggctttgccgtgtgcttctgccaccctgctgagtctgttctggtaatcggggtataataggctctgcctgacagagggatggaggaagaactgaaaggcttttcaaccacaaaactcatctggagttctcaaagacctggggctgctgtgaagctggaactgcgggagccccatctaggggagccttgattcccttgttattcaacagcaagtgtgaatactgcttgaataaacaccactggattaatggaaaaaaaaaaaaaaaa

SEQ ID NO: 394 - DNA, 1541 bp, Homo sapiens
gtgtccccggagctgaaagatcgcaaagaggatgcgaaagggatggaggacgaaggccagaccaaaatcaagcagaggcgaagtcggaccaatttcaccctggaacaactcaatgagctggagaggctttttgacgagacccactatcccgacgccttcatgcgagaggaactgagccagcgactgggcctgtcggaggcccgagtgcaggtttggtttcaaaatcgaagagctaaatgtagaaaacaagaaaatcaactccataaaggtgttctcataggggccgccagccagtttgaagcttgtagagtcgcaccttatgtcaacgtaggtgctttaaggatgccatttcagcaggttcaggcgcagctgcagctggacagcgctgtggcgcacgcgcaccaccacctgcatccgcacctggccgcgcacgcgccctacatgatgttcccagcaccgcccttcggactgccgctcgccacgctggccgcggattcggcttccgccgcctcggtagtggcggccgcagcagccgccaagaccaccagcaaggactccagcatcgccgatctcagactgaaagccaaaaagcacgccgcagccctgggtctgtgacgccaacgccagcaccaatgtcgcgcctgtcccgcggcactcagcctgcacgccctccgcgccccgctgcttctccgttacccctttgagacctcgggagccggccctcttcccgcctcactgaccatccctcgtcccctatcgcatcttggactcggaaagccagactccacgcaggaccagggatctcacgaggcacgcaggctccgtggctcctgcccgttttcctactcgagggcctagaattgggttttgtaggagcgggtttgggggagtctggagagagactggacagggtagtgctggaaccgcggagtttggctcaccgcaaagctacaacgatggactcttgcatagaaaaaaaaaatcttgttaacaatgaaaaaatgagcaaacaaaaaaatcgaaagacaaacgggagagaaaaagaggaaggcaacttatttcttaactgctatttggcagaagctgaaattggagaaccaaggagcaaaaacaaattttaaaattaaagtattttatacatttaaaaatatggaaaaacaacccagacgattctcgagagactggggggagttaccaacttaaatgtgtgttttaaaaaatgcgctaagaaggcaaagcagaaagaagaggtatacttatttaaaaaactaagatgaaaaaagtgcgcaggtgggaagttcacaggttttgaaactgacctttttctgcgaagttcacgttaatacgagaaatttgatgagagaggcgggcctccttttacgttgaatcagatgctttgagtttaaacccaccatgtatggaagagcaagaaaagagaaaatattaaaacgaggagagagaaaaataatggcaaaactgtctggactgctgacagtaaattccggtttgcatggaaaaaaaaaaaaaaaaaaaaaaaaaaa

SEQ ID NO: 395 - DNA, 2105 bp, Homo sapiens
gttgccattaggggactcctgaggtcctatctccaggctgcggtgactgcactttccctggagtggaagctgctggaaggcggaccggccgccatgtccacgttcaggcaggaggacgtggaggaccattatgagatgggggaggagctgggcagcggccagtttgcgatcgtgcggaagtgccggcagaagggcacgggcaaggagtacgcagccaagttcatcaagaagcgccgcctgtcatccagccggcgtggggtgagccgggaggagatcgagcgggaggtgaacatcctgcgggagatccggcaccccaacatcatcaccctgcacgacatcttcgagaacaagacggacgtggtcctcatcctggagctggtctctggcggggagctctttgacttcctggcggagaaagagtcgctgacggaggacgaggccacccagttcctcaagcagatcctggacggcgttcactacctgcactctaagcgcatcgcacactttgacctgaagccggaaaacatcatgctgctggacaagaacgtgcccaacccacgaatcaagctcatcgacttcggcatcgcgcacaagatcgaggcggggaacgagttcaagaacatcttcggcaccccggagtttgtggccccagagattgtgaactatgagccgctgggcctggaggcggacatgtggagcatcggtgtcatcacctatatcctcctgagcggtgcatccccgttcctgggcgagaccaagcaggagacgctcaccaacatctcagccgtgaactacgacttcgacgaggagtacttcagcaacaccagcgagctggccaaggacttcattcgccggctgctcgtcaaagatcccaagcggagaatgaccattgcccagagcctggaacattcctggattaaggcgatccggcggcggaacgtgcgtggtgaggacagcggccgcaagcccgagcggcggcgcctgaagaccacgcgtctgaaggagtacaccatcaagtcgcactccagcttgccgcccaacaacagctacgccgacttcgagcgcttctccaaggtgctggaggaggcggcggccgccgaggagggcctgcgcgagctgcagcgcagccggcggctctgccacgaggacgtggaggcgctggccgccatctacgaggagaaggaggcctggtaccgcgaggagagcgacagcctgggccaggacctgcggaggctacggcaggagctgctcaagaccgaggcgctcaagcggcaggcgcaggaggaggccaagggcgcgctgctggggaccagcggcctcaagcgccgcttcagccgcctggagaaccgctacgaggcgctggccaagcaagtagcctccgagatgcgcttcgtgcaggacctcgtgcgcgccctggagcaggagaagctgcagggcgtggagtgcgggctgcgctaggcgcagtggggtgggccaggccccaggacagccggagctcggcctgcggtgggggcgcttcctgtggacgctgcgcctcccatcgcccgggtgcctgtccttgcccagcgccaccaggctggaggcggagtgggaggagctggagccaggcccgtaagttcgcaggcaggggtgggtgtgggacggggctgcttctctacacagcctctacgctggccttcaccttcacccctgcatcgtcggtgaccctgggaccctccaggcagcgtggcctgtggcaccgtgagggttgggacccaccgaggcgcagaggcggcccgaatgcagccctggttcaggcccggaggagggtttgcgggtagttgcacggacaattcggcggggtgctgcctgttgctgccattagcccaggaggaggtcgtgggacggggagggtgggatggacggcggacaggcagtccccacgctgctgggtggcgccgggcttggtggggtcttccactgtgtgcccttctcgccgaggccggtcccccgggtgtggggtgccctgctgcggactcctccgcgagccccatcgtcgcgcctgtggacgcctaggcaagagcggccctctgcagccaagagaaataaaatactggcttccagat

SEQ ID NO: 396 - DNA, 2254 bp, Homo sapiens
gggaattctgaaagccgctggcggaccgcgcgcagcggccagagaccgagccctaaggagagtgcggcgcttcccgaggcgtgcagctgggaactgcaactcatctgggttgtgcgcagaaggctggggcaagcgagtagagaagtggagcgtaagccaggggcgttgggggccgtgcgggtcgggcgcgtgccacgcccgcggggtgaagtcggagcgcggggcctgctggagagaggagcgctgcggaccgagtaatggcaatgcagatgcagcttgaagcaaatgcagatacttcagtggaagaagaaagctttggcccacaacccatttcacggttagagcagtgtggcataaatgccaacgatgtgaagaaattggaagaagctggattccatactgtggaggctgttgcctatgcgccaaagaaggagctaataaatattaagggaattagtgaagccaaagctgataaaattctggctgaggcagctaaattagttccaatgggtttcaccactgcaactgaattccaccaaaggcggtcagagatcatacagattactactggctccaaagagcttgacaaactacttcaaggtggaattgagactggatctatcacagaaatgtttggagaattccgaactgggaagacccagatctgtcatacgctagctgtcacctgccagcttcccattgaccggggtggaggtgaaggaaaggccatgtacattgacactgagggtacctttaggccagaacggctgctggcagtggctgagaggtatggtctctctggcagtgatgtcctggataatgtagcatatgctcgagcgttcaacacagaccaccagacccagctcctttatcaagcatcagccatgatggtagaatctaggtatgcactgcttattgtagacagtgccaccgccctttacagaacagactactcgggtcgaggtgagctttcagccaggcagatgcacttggccaggtttctgcggatgcttctgcgactcgctgatgagtttggtgtagcagtggtaatcactaatcaggtggtagctcaagtggatggagcagcgatgtttgctgctgatcccaaaaaacctattggaggaaatatcatcgcccatgcatcaacaaccagattgtatctgaggaaaggaagaggggaaaccagaatctgcaaaatctacgactctccctgtcttcctgaagctgaagctatgttcgccattaatgcagatggagtgggagatgccaaagactgaatcattgggtttttcctctgttaaaaaccttaagtgctgcagcctaatgagagtgcactgctccctggggttctctacaggcctcttcctgttgtgactgccaggataaagcttccgggaaaacagctattatatcagcttttctgatggtataaacaggagacaggtcagtagtcacaaactgatctaaaatgtttattccttctgtagtgtattaatctctgtgtgttttctttggttttggaggaggggtatgaagtatctttgacatggtgccttaggaatgacttgggtttaacaagctgtctactggacaatcttatgtttccaagagaactaaagctggagagacctgacccttctctcacttctaaattaatggtaaaataaaatgcctcagctatgtagcaaagggaatgggtctgcacagattctttttttctgtcagtaaaactctcaagcaggtttttaagttgtctgtctgaatgatcttgtgtaagggtttggttatggagtcttgtgccaaacctactaggccattagcccttcaccatctacctgcttggtctttcattgctaagactaactcaagataatcctagagtcttaaagcatttcaggccagtgtggtgtcttgcgcctgtactcccagcactttgggaggccgaggcaggtggatcgcttgagccaggagttttaagtccagcttggccaagatggtgaaatcccatctctacaaaaaatgcagaacttaatctggacacactgttacacgtgcctgtagtcccagctactctatagcctgaggtgggagaatcacttaagcctggaaggtggaagttgcagtgagtcgagattgcactgctgcattccagccagggtgacagagtgagaccatgtttcaaacaagaaacatttcagagggcaagtaaacagatttgattgtgaggcttctaataaagtagttattagtagtg

SEQ ID NO: 397 - DNA, 2152 bp, Homo sapiens
ggcggcgtctggggcgctttcgcaacattcagacctcggttgcagcccggtgccgtgagctgaagaggtttcacatcttactccgccccacaccctgggcgttgcggcgctgggctcgttgctgcagccggaccctgctcgatgggcacgactgggctggagagtctgagtctgggggaccgcggagctgcccccaccgtcacctctagtgagcgcctagtcccagacccgccgaatgacctccgcaaagaagatgttgctatggaattggaaagagtgggagaagatgaggaacaaatgatgataaaaagaagcagtgaatgtaatcccttgctacaagaacccatcgcttctgctcagtttggtgctactgcaggaacagaatgccgtaagtctgtcccatgtggatgggaaagagttgtgaagcaaaggttatttgggaagacagcaggaagatttgatgtgtactttatcagcccacaaggactgaagttcagatccaaaagttcacttgctaattatcttcacaaaaatggagagacttctcttaagccagaagattttgattttactgtactttctaaaaggggtatcaagtcaagatataaagactgcagcatggcagccctgacatcccatctacaaaaccaaagtaacaattcaaactggaacctcaggacccgaagcaagtgcaaaaaggatgtgtttatgccgccaagtagtagttcagagttgcaggagagcagaggactctctaactttacttccactcatttgcttttgaaagaagatgagggtgttgatgatgttaacttcagaaaggttagaaagcccaaaggaaaggtgactattttgaaaggaatcccaattaagaaaactaaaaaaggatgtaggaagagctgttcaggttttgttcaaagtgatagcaaaagagaatctgtgtgtaataaagcagatgctgaaagtgaacctgttgcacaaaaaagtcagcttgatagaactgtctgcatttctgatgctggagcatgtggtgagaccctcagtgtgaccagtgaagaaaacagccttgtaaaaaaaaaagaaagatcattgagttcaggatcaaatttttgttctgaacaaaaaacttctggcatcataaacaaattttgttcagccaaagactcagaacacaacgagaagtatgaggatacctttttagaatctgaagaaatcggaacaaaagtagaagttgtggaaaggaaagaacatttgcatactgacattttaaaacgtggctctgaaatggacaacaactgctcaccaaccaggaaagacttcactggtgagaaaatatttcaagaagataccatcccacgaacacagatagaaagaaggaaaacaagcctgtatttttccagcaaatataacaaagaagctcttagccccccacgacgtaaagcctttaagaaatggacacctcctcggtcaccttttaatctcgttcaagaaacactttttcatgatccatggaagcttctcatcgctactatatttctcaatcggacctcaggcaaaatggcaatacctgtgctttggaagtttctggagaagtatccttcagctgaggtagcaagaaccgcagactggagagatgtgtcagaacttcttaaacctcttggtctctacgatcttcgggcaaaaaccattgtcaagttctcagatgaatacctgacaaagcagtggaagtatccaattgagcttcatgggattggtaaatatggcaacgactcttaccgaattttttgtgtcaatgagtggaagcaggtgcaccctgaagaccacaaattaaataaatatcatgactggctttgggaaaatcatgaaaaattaagtttatcttaaactctgcagctttcaagctcatctgttatgcatagctttgcacttcaaaaaagcttaattaagtacaaccaaccacctttccagccatagagattttaattagcccaactagaagcctagtgtgtgtgctttcttaatgtgtgtgccaatggtggatctttgctactgaatgtgtttgaacatgttttgagatttttttaaaataaattattatttgacaacaaaaaaaaaaaaaaaaaaaaaaaaaaaaaaaaaaaaaaaaaaaaaa

SEQ ID NO: 398 - DNA, 2143 bp, Homo sapiens
ggtaagagtcgcgtagcccgagccgggcggaaccactgttcgcgctgccgtgtttccgggcggggacactcagggcgcgacgcttttctgttacccacagaggcccgccgcggctgcgccatccgcggccatgaagtttcgggccaagatcgtggacggggcctgtctgaaccacttcacacgaatcagtaacatgatagccaagcttgccaaaacctgcaccctccgcatcagccctgataagcttaacttcatcctttgtgacaagctggctaatggaggagtgagcatgtggtgtgagctggaacaggagaacttcttcaacgaatttcaaatggagggtgtctctgcagaaaacaatgagatttatttagagctaacatcggaaaacttatctcgagccttgaagactgcccagaatgccagggctttgaaaatcaaactgactaataaacactttccctgcctcacggtctccgtggagctgttatctatgtcaagcagtagccgcattgtgacccatgacatccccataaaggtgattcctaggaaattgtggaaggacttacaagaaccggtggtcccagatcctgatgttagtatttatttaccagtcttgaagactatgaagagtgttgtggaaaaaatgaaaaacatcagcaatcaccttgttattgaagcaaacctagatggagaattgaatttgaaaatagaaactgaattagtatgtgttacaactcattttaaagatcttggaaatcctccattagcctctgaaagcacccatgaggacagaaacgtggaacacatggctgaagtgcacatagatattaggaagctcctacagtttcttgctggacaacaagtaaatcccacaaaggccttatgcaatattgtgaataacaagatggtgcattttgatctgcttcatgaagacgtgtcccttcagtatttcatccctgcgctgtcctagcaccctgtcgctggagttggcatgcagagactttgtcaggatgggagaggccgcaggtgttgtgttctgatcactggtctgtgccctcacagcaccgcacatcgacacactgtacttatttgtccctctctaacattttaactaaaagttgattcaacaacacacagttggataaacatatcacttcatgttgctcatgtctgttttgctttgtttttaagacactgaaaagaaaagctagaatttatttattcagactttaaagaacaatttctcattgatgttgtgaaaatcgtcatgtatttagacttggtgtagtagccagaattcgtaaagctgttgcctgggagcttggtactttccctccaggcagaggctctagctcagcacggcctgtagcgcacagtcagtcttgcatttcagtgtgttcaccccgctgctcctgccccttggagcccagtgacagaaagaacagcctctgtcaccccgccgccactgccttggttactcagagcactgtggggtgtcacagctgcagcatttggagtctctctcttgctgaggactcaagcccacctgagtccactcccctcttgatgcctagagagctggcccagccaacacagctcttagctgggagctccttctgccattccaactagtttcttcctggggccagttttgggtttaggttgtaattccttatatttctttcttccacagtgtatcggatctgtcgttctggaaagaagacccttctatttagagtagaaacaaacgaaacttctaaggtatcatctgtgttaagtgatgagaccatatttctttgatgtttctgaacatcaaagctgattcagtactggtagatgtgctcattctccctgaaacatacccatcatatttcctattataattacatctcattgtcctgtggaggtggacatgataaacattatcttttgttttcttgttttgttttgtttgagacggtctcattctgtcacccagactggagtgcagtgccacaatcatggctcaccgcattgacctccttggctcaaggcatcctcccacctcagcttcctgactagctgggactactggtgtgcaccaccacacccagctaattttcaatttttcatagagacagggtctcactgtgttgtccag

SEQ ID NO: 399 - DNA, 1649 bp, Homo sapiens
gtttgtagaggggtgggtgcgcacgtctgtccctgcgtgaccttccgaccccgctgtcctcaccgcaatggcggctgtgagggccctggtggcctcgaggctcgctgcggcatctgcattcacgtccctgtcccccggcggtcggacgccttcccagcgcgcagcccttcacctctccgtgccgcgccccgcggccagggtcgcgctggtgctgtctggatgcggagtctacgatgggaccgagatccacgaggcctcggcgatcctggtgcacctgagccgtggaggggctgaagtccagatctttgctcctgacgtccctcagatgcacgtgattgaccacaccaaggggcagccgtccgaaggcgagagcaggaatgttttgaccgagtctgcgaggatcgcccgtggcaaaatcacagacctggccaacctcagtgcagccaaccatgatgctgccatctttccaggaggctttggagcggctaaaaacctgagcacgtttgccgtggacgggaaagattgcaaggtgaataaagaagtggagcgtgtcctgaaggagttccaccaggccgggaagcccatcggcttgtgctgcattgcacctgtcctcgcggccaaggtgctcagaggcgtcgaggtgactgtgggccacgagcaggaggaaggtggcaagtggccttatgccgggaccgcagaggccatgaaggccctgggtgccaagcactgcgtgaaggaagtggtcgaagctcacgtggaccagaaaaacaaggtggtcacgaccccagccttcatgtgcgagacggcactccactacatccatgatgggatcggagccatggtgaggaaggtgctggaactcactggaaagtgacgcgcatggacggggcccagctaggcgccaggacttggcctcaccctctggctgaggagctgtcggctgctttccatccagctgggagtctggcaggcccttttttttttttctttgccgaaacctgcaggcgttctctctctaaggaggatgtgctgcagtgcatgggggatgtttcttcctgggtgtggctgggctgctctcacatacagaggccgaggggccaattcgttctctgccacagggacttgcctcactgtgtcccaaaaacaaatcgcagccagcttttccagaaatagaaaattctgccgtctgaggttttatacttcaggttagttagtttttggaaggaagaacatttttaggtttgcaagcctcctgatcaggaaaccagaaataccacatttatggaccatgaaaggttggttcttgactctgaagggacttttgagttaatcagcgtaaggggatttctaaagcaggcaatccctgtagccgcagagaataaacgccttcccaaaatggcaacttcccacagccacatttcagacctgctgagactgctgagtgaggaatggcagtgaggtttcttcaattagtctcagttctcttaattttcaggaagaaagggaaattgcagctcctcagcccccaggattgacctctggggagtgatggtagcgttggtgccaggccgtgggttcaggtgtggcagaagcttgcagatgcgtccgaagggaaataaagtgtgttggcgttagactttgtgctgcaa

SEQ ID NO: 400 - DNA, 3610 bp, Homo sapiens
cctgcctgcccgcctgcttgctctctggctgtgctcctgcttaaagaaatcagtccttcctttccgacttagtcctcgggaagaagtttcagactacaaggtatcattggaacatttcaagatcatcaaatcaaattccacagggattggtgaccaaccagaaggctcagacatctgattgctgacctgtccagacatcatctggtctccctgaacctgaaatcacaccatggatgattttgagcgtcgcagagaacttagaaggcaaaagagggaggagatgcgactcgaagcagaaagaatcgcctaccagaggaatgacgatgatgaagaggaggcagcccgggaacgccgccgccgagcccgacaggaacggctgcggcagaagcaggaggaagaatccttgggacaggtgaccgaccaggtggaggtgaatgcccagaacagtgtgcctgacgaggaggccaagacaaccaccacaaacactcaagtggaaggggatgatgaggccgcattcctggagcgcctggctcggcgtgaggaaagacgccaaaaacgccttcaggaggctctggagcggcagaaggagttcgacccaacaataacagatgcaagtctgtcgctcccaagcagaagaatgcaaaatgacacagcagaaaatgaaactaccgagaaggaagaaaaaagtgaaagtcgccaagaaagatacgagatagaggaaacagaaacagtcaccaagtcctaccagaagaatgattggagggatgctgaagaaaacaagaaagaagacaaggaaaaggaggaggaggaagaggagaagccaaagcgagggagcattggagaaaatcaggtagaggtgatggtggaagagaaaacaactgaaagccaggaggaaacagtggtaatgtcattaaaaaatgggcagatcagttcagaagagcctaaacaagaggaggagagggaacaaggttcagatgagatttcccatcatgaaaagatggaagaggaagacaaggaaagagctgaggcagagagggcaaggttggaagcagaagaaagagaaagaattaaagccgagcaagacaaaaagatagcagatgaacgagcaagaattgaagcagaagaaaaagcagctgcccaagaaagagaaaggagagaggcagaagagagggaaaggatgagggaggaagagaaaagggcagcagaggagaggcagaggataaaggaggaagagaaaagggcagcagaggagaggcagaggataaaggaggaagagaaaagggcagcagaggagaggcagaggataaaagaggaagagaaaagggcagcagaggagaggcaaagggccagggcagaggaggaagagaaggctaaggtagaagagcagaaacgtaacaagcagctagaagagaaaaaacgtgccatgcaagagacaaagataaaaggggaaaaggtagaacagaaaatagaagggaaatgggtaaatgaaaagaaagcacaagaagataaacttcagacagctgtcctaaagaaacagggagaagagaagggaactaaagtgcaagctaaaagagaaaagctccaagaagacaagcctaccttcaaaaaagaagagatcaaagatgaaaagattaaaaaggacaaagaacccaaagaagaagttaagagcttcatggatcgaaagaagggatttacagaagttaagtcgcagaatggagaattcatgacccacaaacttaaacatactgagaatactttcagccgccctggagggagggccagcgtggacaccaaggaggctgagggcgccccccaggtggaagccggcaaaaggctggaggagcttcgtcgtcgtcgcggggagaccgagagcgaagagttcgagaagctcaaacagaagcagcaggaggcggctttggagctggaggaactcaagaaaaagagggaggagagaaggaaggtcctggaggaggaagagcagaggaggaagcaggaggaagccgatcgaaaactcagagaggaggaagagaagaggaggctaaaggaagagattgaaaggcgaagagcagaagctgctgagaaacgccagaagatgccagaagatggcttgtcagatgacaagaaaccattcaagtgtttcactcctaaaggttcatctctcaagatagaagagcgagcagaatttttgaataagtctgtgcagaaaagcagtggtgtcaaatcgacccatcaagcagcaatagtctccaagattgacagcagactggagcagtataccagtgcaattgagggaacaaaaagcgcaaaacctacaaagccggcagcctcggatcttcctgttcctgctgaaggtgtacgcaacatcaagagtatgtgggagaaagggaatgtgttttcatcccccactgcagcaggcacaccaaataaggaaactgctggcttgaaggtaggggtttctagccgcatcaatgaatggctaactaaaaccccagatggaaacaagtcacctgctcccaaaccttctgacttgagaccaggagacgtatccagcaagcggaacctctgggaaaagcaatctgtggataaggtcacttcccccactaaggtttgagacagttccagaaagaacccaagctcaagacgcaggacgagctcagttgtagagggctaattcgctctgttttgtatttatgttgatttactaaattgggttcattatcttttatttttcaatatcccagtaaacccatgtatattatcactatatttaataatcacagtctagagatgttcatggtaaaagtactgcctttgcacaggatcctgtttctaaagaaacccatgctgtgaaatagagacttttctactgatcatcataactctgtatctgagcagtgataccaaccacatctgaagtcaacagaagatccaagtttaaaattgctgcggaatgtgtgcagtatctagaaaaatgaaccgtagtttttgtttttttaaatacagaagtcatgttgtttctgcactttataataaagcatggaagaaattatcttagtaggcaattgtaacactttttgaaagtaacccatttcagatttgaaatactgcaataatggttgtctttaaaaaaaaaaagaatgtactgttaaggtattactttttttcatgctgatgattcatatctaaattacattattatgttagctgacagtggtactgattttttaggttggttgttttgtggatttctttagtagtgatagtagcctgaaccacattttagataactcaattatgtatgtatgtgcatacacatatacaaacacactaatggtagaatgcttttttatgtgctagactattatatttagtagtatgtcattgtaactagccaatatcacagcttttgaaaaattaaaaaatcatcatcactataatatttcatatttgccaacagaaacatggcagataggtatcaatatgttttcaatgcctgatgacctataagaagaaagtattgaaaagaagagagattagaactgttagaaggagttgaaattttctaaaagacatagtatttagtttataattaaatgcattcttgaagtcc

SEQ ID NO: 401 - DNA, 2428 bp, Homo sapiens
acctggccgccatgcgcctctcctcctccccacctcgtggcccgcagcagctctccagctttggctccgtggactggctctcccagagcagctgctcagggccgacccacacccccaggcctgccgacttctccctggggagcctccctggcccaggccagacatccggcgcccgggagccccctcaggccgtcagcatcaaggaggccgccgggtcctcaaatctgcctgcgccggagaggaccatggccgggttgagtaaggagccaaataccttgcgggccccccgtgtccgcacagccttcaccatggagcaggtccgcaccttggagggcgtcttccagcaccaccagtacctgagccctctggagcggaagaggctggccagggagatgcagctctcagaggtccagataaaaacctggtttcagaatcgccgcatgaaacacaaacggcaaatgcaggacccccagctgcacagccccttctcggggtctctccatgcgcccccagctttctactcaacgtcttctggccttgccaatggcctgcagctgctgtgcccttgggcacccctgtccgggccccaggctctgatgctgccccctggctccttctggggtctctgccaagtggcacaagaggccctggcatctgcgggagcttcctgctgcgggcagcctctggcgtcccacccccctaccccaggccggccttcgctgggaccagccctgtccacggggccccggggcctgtgtgctatgccacagacgggggatgcattttgaggaggcacctctgactcccacactcgcggtcttgctgatcgcacctggctcctacctggaggactcagttgttctgtttacatcctggtggcacctctcaccctgacccacacaaaggttctggagattactggagaatatatataaatatatatatgtacgtatatatgtaaatacacatatacgtatatataaatatatatatacatatgtgtgtgtatatatatatatatttttttttttttttttttttttgagacggagtgttgctctgtcacccaggctggagtgcaatgacgcaatctcggctcactgcaacctccgcctcctgggttcaagcgattctccagcctcagcctcccgagtagctgggattacagacacccgccaccacgcccggctaattttttctatttttagtagaaatggggtttcaccatgttagccaggctggtctcaaactcctgaccctgtgatccgcccgcctcggcctcccaaagtgctgggattacaggcatgagccactgcacccggccctgagaatatatttattaaagccacctcttcactgaaagttaccgaaagagtcggtttaggaaggaaacgaagggtcagtgaacagagtcaaatgcagaagtgggcttgtcatgggtagggctttcggcgtacgataaaaggatcatttgttttttaaaaggggttggaaaaactggttttccagttggaaacagtaaaggttgtaagctttgtgtgtacaaaagaaaacagggaatgcaggtgtgtttatagcgttgtggttcaagtccctcttaacaagaactccaaagctggaaagcaggagggaacaaaggtgaacatgaaggcgaggatgctggggccctgcagtgcgctctaggctgtgcgtgagccgggactgtacccacagcttgctgagggctgctcttcttgggccagggaaagcagggcagccgggacctgcggctgtgcctggactgaagctgtcccgcaggtccccaccctccaacacgtgctcacctgtccccctcctcgcagcagcctcgggacaaaacaatgactcaaggacagcacttctcgcagaaggtctggaagtgcccagaatgggaggcacggaagcccctcccggggaggactcccgcgttgatggaccgttcttggtgcagactcctgactgcgtgcatgaaacctgagacaagtgcaattccttccatgtcgccccagagtgcccaggaggcaggcagtgcggggtgcccaggcagacgggttcagcctgcagaactggaggcgacctgtgaaacccacccgggcaccccaacaggaacagaagcgtggtcctgcggctgcgtccccagcgagtttcactttccccttgctcgtttctcccttgttgtaagtgtttacaactggcatgtgcttttaaacgtcaggtaagaggggaacagctgctgtacatcgtcctggcgagtgacaatgtgacagaagcctgggcgaggccctcggagggcagcagctggacaggggctactgggtttggcctggacagcactgatttgtggatgtggatgggggcacgttgtccgtgataaaagtacaagtgcccctcacaaaaaaaaaaaaaaaaa

SEQ ID NO: 402 - DNA, 2700 bp, Homo sapiens
tctgacactccaggtagcgagggagttgggtctccaggttgtgcgaggagcaaatgatgaccgccaaggccgtagacaaaatcccagtaactctcagtggttttgtgcaccagctgtctgacaacatctacccggtggaggacctcgccgccacgtcggtgaccatctttcccaatgccgaactgggaggcccctttgaccagatgaacggagtggccggagatggcatgatcaacattgacatgactggagagaagaggtcgttggatctcccatatcccagcagctttgctcccgtctctgcacctagaaaccagaccttcacttacatgggcaagttctccattgacccacagtaccctggtgccagctgctacccagaaggcataatcaatattgtgagtgcaggcatcttgcaaggggtcacttccccagcttcaaccacagcctcatccagcgtcacctctgcctcccccaacccactggccacaggacccctgggtgtgtgcaccatgtcccagacccagcctgacctggaccacctgtactctccgccaccgcctcctcctccttattctggctgtgcaggagacctctaccaggacccttctgcgttcctgtcagcagccaccacctccacctcttcctctctggcctacccaccacctccttcctatccatcccccaagccagccacggacccaggtctcttcccaatgatcccagactatcctggattctttccatctcagtgccagagagacctacatggtacagctggcccagaccgtaagccctttccctgcccactggacaccctgcgggtgccccctccactcactccactctctacaatccgtaactttaccctggggggccccagtgctgggatgaccggaccaggggccagtggaggcagcgagggaccccggctgcctggtagcagctcagcagcagcagcagccgccgccgccgccgcctataacccacaccacctgccactgcggcccattctgaggcctcgcaagtaccccaacagacccagcaagacgccggtgcacgagaggccctacccgtgcccagcagaaggctgcgaccggcggttctcccgctctgacgagctgacacggcacatccgaatccacactgggcataagcccttccagtgtcggatctgcatgcgcaacttcagccgcagtgaccacctcaccacccatatccgcacccacaccggtgagaagcccttcgcctgtgactactgtggccgaaagtttgcccggagtgatgagaggaagcgccacaccaagatccacctgagacagaaagagcggaaaagcagtgccccctctgcatcggtgccagccccctctacagcctcctgctctgggggcgtgcaggcctgggggtaccctgtgcagcagtaacagcagcagtcttggcggagggccgctcgccccttgctcctctcggacccggacaccttgagatgagactcaggctgatacaccagctcccaaaggtcccggaggccctttgtccactggagctgcacaacaaacactaccaccctttcctgtccctctctccctttgttgggcaaagggctttggtggagctagcactgccccctttccacctagaagcaggttcttcctaaaacttagcccattctagtctctcttaggtgagttgactatcaacccaaggcaaaggggaggctcagaaggaggtggtgtggggatcccctggccaagagggctgaggtctgaccctgctttaaagggttgtttgactaggttttgctaccccacttccccttattttgacccatcacaggtttttgaccctggatgtcagagttgatctaagacgttttctacaataggttgggagatgctgatcccttcaagtggggacagcaaaaagacaagcaaaactgatgtgcactttatggcttgggactgatttgggggacattgtacagtgagtgaagtatagcctttatgccacactctgtggccctaaaatggtgaatcagagcatatctagttgtctcaacccttgaagcaatatgtattatatactcagagaacagaagtgcaatgtgatgggaggaacgtagcaatatctgctccttttcgagttgtttgagaaatgtaggctattttttcagtgtatatccactcagattttgtgtatttttgatgtacccacactgttctctaaattctgaatctttgggaaaaaatgtaaagcatttatgatctcagaggttaacttatttaagggggatgtacatattctctgaaactaggatgcatgcaattgtgttggaagtgtccttggtcgccttgtgtgatgtagacaaatgttacaaggctgcatgtaaatgggttgccttattatggagaaaaaaatcactccctgagtttagtatggctgtatatttatgcctattaatatttggaattttttttagaaagtatatttttgtatgctttgttttgtgacttaaaagtgttacctttgtagtcaaatttcagataagaatgtacataatgttaccggagctgatttgtttggtcattagctcttaatagttgtgaaaaaataaatctattctaacgcaaaaccactaactgaagttcagatataatggatggtttgtgactatagtgtaaataaatacttttcaacaat

SEQ ID NO: 403 - DNA, 8091 bp, Homo sapiens
acgcggcgcggaggctggcccgggacgcgcccggagcccagggaaggagggaggaggggagggtcgcggccggccgccatggggccgggggcccgtggccgccgccgccgccgtcgcccgatgtcgccgccaccgccaccgccacccgtgcgggcgctgcccctgctgctgctgctagcggggccgggggctgcagcccccccttgcctggacggaagcccgtgtgcaaatggaggtcgttgcacccagctgccctcccgggaggctgcctgcctgtgcccgcctggctgggtgggtgagcggtgtcagctggaggacccctgtcactcaggcccctgtgctggccgtggtgtctgccagagttcagtggtggctggcaccgcccgattctcatgccggtgcccccgtggcttccgaggccctgactgctccctgccagatccctgcctcagcagcccttgtgcccacggtgcccgctgctcagtggggcccgatggacgcttcctctgctcctgcccacctggctaccagggccgcagctgccgaagcgacgtggatgagtgccgggtgggtgagccctgccgccatggtggcacctgcctcaacacacctggctccttccgctgccagtgtccagctggctacacagggccactatgtgagaaccccgcggtgccctgtgcgccctcaccatgccgtaacgggggcacctgcaggcagagtggcgacctcacttacgactgtgcctgtcttcctgggtttgagggtcagaattgtgaagtgaacgtggacgactgtccaggacaccgatgtctcaatggggggacatgcgtggatggcgtcaacacctataactgccagtgccctcctgagtggacaggccagttctgcacggaggacgtggatgagtgtcagctgcagcccaacgcctgccacaatgggggtacctgcttcaacacgctgggtggccacagctgcgtgtgtgtcaatggctggacaggtgagagctgcagtcagaatatcgatgactgtgccacagccgtgtgcttccatggggccacctgccatgaccgcgtggcttctttctactgtgcctgccccatgggcaagactggcctcctgtgtcacctggatgacgcctgtgtcagcaacccctgccacgaggatgctatctgtgacacaaatccggtgaacggccgggccatttgcacctgtcctcccggcttcacgggtggggcatgtgaccaggatgtggacgagtgctctatcggcgccaacccctgcgagcacttgggcaggtgcgtgaacacgcagggctccttcctgtgccagtgcggtcgtggctacactggacctcgctgtgagaccgatgtcaacgagtgtctgtcggggccctgccgaaaccaggccacgtgcctcgaccgcataggccagttcacctgtatctgtatggcaggcttcacaggaacctattgcgaggtggacattgacgagtgtcagagtagcccctgtgtcaacggtggggtctgcaaggaccgagtcaatggcttcagctgcacctgcccctcgggcttcagcggctccacgtgtcagctggacgtggacgaatgcgccagcacgccctgcaggaatggcgccaaatgcgtggaccagcccgatggctacgagtgccgctgtgccgagggctttgagggcacgctgtgtgatcgcaacgtggacgactgctcccctgacccatgccaccatggtcgctgcgtggatggcatcgccagcttctcatgtgcctgtgctcctggctacacgggcacacgctgcgagagccaggtggacgaatgccgcagccagccctgccgccatggcggcaaatgcctagacctggtggacaagtacctctgccgctgcccttctgggaccacaggtgtgaactgcgaagtgaacattgacgactgtgccagcaacccctgcacctttggagtctgccgtgatggcatcaaccgctacgactgtgtctgccaacctggcttcacagggcccctttgtaacgtggagatcaatgagtgtgcttccagcccatgcggcgagggaggttcctgtgtggatggggaaaatggcttccgctgcctctgcccgcctggctccttgcccccactctgcctccccccgagccatccctgtgcccatgagccctgcagtcacggcatctgctatgatgcacctggcgggttccgctgtgtgtgtgagcctggctggagtggcccccgctgcagccagagcctggcccgagacgcctgtgagtcccagccgtgcagggccggtgggacatgcagcagcgatggaatgggtttccactgcacctgcccgcctggtgtccagggacgtcagtgtgaactcctctccccctgcaccccgaacccctgtgagcatgggggccgctgcgagtctgcccctggccagctgcctgtctgctcctgcccccagggctggcaaggcccacgatgccagcaggatgtggacgagtgtgctggccccgcaccctgtggccctcatggtatctgcaccaacctggcagggagtttcagctgcacctgccatggagggtacactggcccttcctgtgatcaggacatcaatgactgtgaccccaacccatgcctgaacggtggctcgtgccaagacggcgtgggctccttttcctgctcctgcctccctggtttcgccggcccacgatgcgcccgcgatgtggatgagtgcctgagcaacccctgcggcccgggcacctgtaccgaccacgtggcctccttcacctgcacctgcccgccgggctacggaggcttccactgcgaacaggacctgcccgactgcagccccagctcctgcttcaatggcgggacctgtgtggacggcgtgaactcgttcagctgcctgtgccgtcccggctacacaggagcccactgccaacatgaggcagacccctgcctctcgcggccctgcctacacgggggcgtctgcagcgccgcccaccctggcttccgctgcacctgcctcgagagcttcacgggcccgcagtgccagacgctggtggattggtgcagccgccagccttgtcaaaacgggggtcgctgcgtccagactggggcctattgcctttgtccccctggatggagcggacgcctctgtgacatccgaagcttgccctgcagggaggccgcagcccagatcggggtgcggctggagcagctgtgtcaggcgggtgggcagtgtgtggatgaagacagctcccactactgcgtgtgcccagagggccgtactggtagccactgtgagcaggaggtggacccctgcttggcccagccctgccagcatggggggacctgccgtggctatatggggggctacatgtgtgagtgtcttcctggctacaatggtgataactgtgaggacgacgtggacgagtgtgcctcccagccctgccagcacgggggttcatgcattgacctcgtggcccgctatctctgctcctgtcccccaggaacgctgggggtgctctgcgagattaatgaggatgactgcggcccaggcccaccgctggactcagggccccggtgcctacacaatggcacctgcgtggacctggtgggtggtttccgctgcacctgtcccccaggatacactggtttgcgctgcgaggcagacatcaatgagtgtcgctcaggtgcctgccacgcggcacacacccgggactgcctgcaggacccaggcggaggtttccgttgcctttgtcatgctggcttctcaggtcctcgctgtcagactgtcctgtctccctgcgagtcccagccatgccagcatggaggccagtgccgtcctagcccgggtcctgggggtgggctgaccttcacctgtcactgtgcccagccgttctggggtccgcgttgcgagcgggtggcgcgctcctgccgggagctgcagtgcccggtgggcgtcccatgccagcagacgccccgcgggccgcgctgcgcctgccccccagggttgtcgggaccctcctgccgcagcttcccggggtcgccgccgggggccagcaacgccagctgcgcggccgccccctgtctccacgggggctcctgccgccccgcgccgctcgcgcccttcttccgctgcgcttgcgcgcagggctggaccgggccgcgctgcgaggcgcccgccgcggcacccgaggtctcggaggagccgcggtgcccgcgcgccgcctgccaggccaagcgcggggaccagcgctgcgaccgcgagtgcaacagcccaggctgcggctgggacggcggcgactgctcgctgagcgtgggcgacccctggcggcaatgcgaggcgctgcagtgctggcgcctcttcaacaacagccgctgcgaccccgcctgcagctcgcccgcctgcctctacgacaacttcgactgccacgccggtggccgcgagcgcacttgcaacccggtgtacgagaagtactgcgccgaccactttgccgacggccgctgcgaccagggctgcaacacggaggagtgcggctgggatgggctggattgtgccagcgaggtgccggccctgctggcccgcggcgtgctggtgctcacagtgctgctgccgccggaggagctactgcgttccagcgccgactttctgcagcggctcagcgccatcctgcgcacctcgctgcgcttccgcctggacgcgcacggccaggccatggtcttcccttaccaccggcctagtcctggctccgaaccccgggcccgtcgggagctggcccccgaggtgatcggctcggtagtaatgctggagattgacaaccggctctgcctgcagtcgcctgagaatgatcactgcttccccgatgcccagagcgccgctgactacctgggagcgttgtcagcggtggagcgcctggacttcccgtacccactgcgggacgtgcggggggagccgctggagcctccagaacccagcgtcccgctgctgccactgctagtggcgggcgctgtcttgctgctggtcattctcgtcctgggtgtcatggtggcccggcgcaagcgcgagcacagcaccctctggttccctgagggcttctcactgcacaaggacgtggcctctggtcacaagggccggcgggaacccgtgggccaggacgcgctgggcatgaagaacatggccaagggtgagagcctgatgggggaggtggccacagactggatggacacagagtgcccagaggccaagcggctaaaggtagaggagccaggcatgggggctgaggaggctgtggattgccgtcagtggactcaacaccatctggttgctgctgacatccgcgtggcaccagccatggcactgacaccaccacagggcgacgcagatgctgatggcatggatgtcaatgtgcgtggcccagatggcttcaccccgctaatgctggcttccttctgtgggggggctctggagccaatgccaactgaagaggatgaggcagatgacacatcagctagcatcatctccgacctgatctgccagggggctcagcttggggcacggactgaccgtactggcgagactgctttgcacctggctgcccgttatgcccgtgctgatgcagccaagcggctgctggatgctggggcagacaccaatgcccaggaccactcaggccgcactcccctgcacacagctgtcacagccgatgcccagggtgtcttccagattctcatccgaaaccgctctacagacttggatgcccgcatggcagatggctcaacggcactgatcctggcggcccgcctggcagtagagggcatggtggaagagctcatcgccagccatgctgatgtcaatgctgtggatgagcttgggaaatcagccttacactgggctgcggctgtgaacaacgtggaagccactttggccctgctcaaaaatggagccaataaggacatgcaggatagcaaggaggagacccccctattcctggccgcccgcgagggcagctatgaggctgccaagctgctgttggaccactttgccaaccgtgagatcaccgaccacctggacaggctgccgcgggacgtagcccaggagagactgcaccaggacatcgtgcgcttgctggatcaacccagtgggccccgcagcccccccggtccccacggcctggggcctctgctctgtcctccaggggccttcctccctggcctcaaagcggcacagtcggggtccaagaagagcaggaggccccccgggaaggcggggctggggccgcaggggccccgggggcggggcaagaagctgacgctggcctgcccgggccccctggctgacagctcggtcacgctgtcgcccgtggactcgctggactccccgcggcctttcggtgggccccctgcttcccctggtggcttcccccttgaggggccctatgcagctgccactgccactgcagtgtctctggcacagcttggtggcccaggccgggcaggtctagggcgccagccccctggaggatgtgtactcagcctgggcctgctgaaccctgtggctgtgcccctcgattgggcccggctgcccccacctgcccctccaggcccctcgttcctgctgccactggcgccgggaccccagctgctcaacccagggacccccgtctccccgcaggagcggcccccgccttacctggcagtcccaggacatggcgaggagtacccggtggctggggcacacagcagccccccaaaggcccgcttcctgcgggttcccagtgagcacccttacctgaccccatcccccgaatcccctgagcactgggccagcccctcacctccctccctctcagactggtccgaatccacgcctagcccagccactgccactggggccatggccaccaccactggggcactgcctgcccagccacttcccttgtctgttcccagctcccttgctcaggcccagacccagctggggccccagccggaagttacccccaagaggcaagtgttggcctgagacgctcgtcagttcttagatcttgggggcctaaagagacccccgtcctgcctcctttctttctctgtctcttccttccttttagtctttttcatcctcttctctttccaccaaccctcctgcatccttgccttgcagcgtgaccgagataggtcatcagcccagggcttcagtcttcctttatttataatgggtgggggctaccacccaccctctcagtcttgtgaagagtctgggacctccttcttccccacttctctcttccctcattcctttctctctccttctggcctctcatttccttacactctgacatgaatgaattattattatttttctttttctttttttttttacattttgtatagaaacaaattcatttaaacaaacttattattattattttttacaaaatatatatatggagatgctccctccccctgtgaaccccccagtgcccccgtggggctgagtctgtgggcccattcggccaagctggattctgtgtacctagtacacaggcatgactgggatcccgtgtaccgagtacacgacccaggtatgtaccaagtaggcacccttgggcgcacccactggggccaggggtcgggggagtgttgggagcctcctccccaccccacctccctcacttcactgcattccagattggacatgttccatagccttgctggggaagggcccactgccaactccctctgccccagccccacccttggccatctccctttgggaactagggggctgctggtgggaaatgggagccagggcagatgtatgcattcctttatgtccctgtaaatgtgggactacaagaagaggagctgcctgagtggtactttctcttcctggtaatcctctggcccagccttatggcagaatagaggtatttttaggctatttttgtaatatggcttctggtcaaaatccctgtgtagctgaattcccaagccctgcattgtacagccccccactcccctcaccacctaataaaggaatagttaacactcaaaaaaaaaaaaaaaaaaa

SEQ ID NO: 404 - DNA, 3513 bp, Homo sapiens
gtgcgggggaagatgtagcagcttcttctccgaaccaaccctttgccttcggacttctccggggccagcagccgcccgaccaggggcccggggccacgggctcagccgacgaccatgggctccgtgtccaaccagcagtttgcaggtggctgcgccaaggcggcagaagaggcgcccgaggaggcgccggaggacgcggcccgggcggcggacgagcctcagctgctgcacggtgcgggcatctgtaagtggttcaacgtgcgcatggggttcggcttcctgtccatgaccgcccgcgccggggtcgcgctcgaccccccagtggatgtctttgtgcaccagagtaagctgcacatggaagggttccggagcttgaaggagggtgaggcagtggagttcacctttaagaagtcagccaagggtctggaatccatccgtgtcaccggacctggtggagtattctgtattgggagtgagaggcggccaaaaggaaagagcatgcagaagcgcagatcaaaaggagacaggtgctacaactgtggaggtctagatcatcatgccaaggaatgcaagctgccaccccagcccaagaagtgccacttctgccagagcatcagccatatggtagcctcatgtccgctgaaggcccagcagggccctagtgcacagggaaagccaacctactttcgagaggaagaagaagaaatccacagccctaccctgctcccggaggcacagaattgagccacaatgggtgggggctattcttttgctatcaggaagtttcgaggagcaggcagagtggagaaagtgggaatagggtgcattggggctagttggcactgccatgtatctcaggcttgggttcacaccatcaccctttcttccctctaggtggggggaaagggtgagtcaaaggaactccaaccatgctctgtccaaatgcaagtgagggttctgggggcaaccaggaggggggaatcaccctacaacctgcatactttgagtctccatccccagaatttccagcttttgaaagtggcctggatagggaagttgttttccttttaaagaaggatatataataattcccatgccagagtgaaatgattaagtataagaccagattcatggagccaagccactacattctgtggaaggagatctctcaggagtaagcattgtttttttttcacatcttgtatcctcatacccacttttgggatagggtgctggcagctgtcccaagcaatgggtaatgatgatggcaaaaagggtgtttgggggaacagctgcagacctgctgctctatgctcacccccgccccattctgggccaatgtgattttatttatttgctcccttggatactgcaccttgggtcccactttctccaggatgccaactgcactagctgtgtgcgaatgacgtatcttgtgcattttaactttttttccttaatataaatattctggttttgtatttttgtatattttaatctaaggccctcatttcctgcactgtgttctcaggtacatgagcaatctcagggatagccagcagcagctccaggtctgcgcagcaggaattactttttgttgtttttgccaccgtggagagcaactatttggagtgcacagcctattgaactacctcatttttgccaataagagctggcttttctgccatagtgtcctcttgaaaccccctctgccttgaaaatgttttatgggagaccaggttttaactgggtggccccatgacttgattgccttctactggaagattgggaattagtctaaacaggaaatggtggtacacagaggctaggagaggctgggcccggtgaaaaggccagagagcaagccaagattaggtgagggttgtctaatcctatggcacaggacgtgctttacatctccagatctgttcttcaccagattaggttaggcctaccatgtgccacagggtgtgtgtgtgtttgtaaaactagagttgctaaggataagtttaaagaccaatacccctgtacttaatcctgtgctgtcgagggatggatatatgaagtaaggtgagatccttaacctttcaaaattttcgggttccagggagacacacaagcgagggttttgtggtgcctggagcctgtgtcctgccctgctacagtagtgattaatagtgtcatggtagctaaaggagaaaaagggggtttcgtttacacgctgtgagatcaccgcaaacctaccttactgtgttgaaacgggacaaatgcaatagaacgcattgggtggtgtgtgtctgatcctgggttcttgtctcccctaaatgctgccccccaagttactgtatttgtctgggctttgtaggacttcactacgttgattgctaggtggcctagtttgtgtaaatataatgtattggtctttctccgtgttctttgggggttttgtttacaaacttctttttgtattgagagaaaaatagccaaagcatctttgacagaaggttctgcaccaggcaaaaagatctgaaacattagtttggggggccctcttcttaaagtggggatcttgaaccatcctttcttttgtattccccttcccctattacctattagaccagatcttctgtcctaaaaacttgtcttctaccctgccctcttttctgttcacccccaaaagaaaacttacacacccacacacatacacatttcatgcttggagtgtctccacaactcttaaatgatgtatgcaaaaatactgaagctaggaaaaccctccatcccttgttcccaacctcctaagtcaagaccattaccatttctttctttctttttttttttttttaaaatggagtctcgctgtgtcgcccaggctggagtgcagtgagctgagatcgcaccactgcactccagcctggttacagagcaagactctgtctcaaacaaaacaaaacaaaacaaaaacacactactgtattttggatggatcaaacctccttaattttaatttctaatcctaaagtaaagagatgcaattgggggccttccatgtagaaagtggggtcaggaggccaagaaagggaatatgaatgtatatccaagtcactcaggaacttttatgcaggtgctagaaactttatgtcaaagtggccacaagattgtttaataggagacgaacgaatgtaactccatgtttactgctagaaaccaaagctttgtgtaaaatcttgaatttatggggcgggagggtaggaaagcctgtacctgtctgtttttttcctgatccttttccctcattcctgaactgcaggagactgagcccctttgggctttggtgaccccatcactggggtgtgtttatttgatggttgattttgctgtactgggtacttcctttcccattttctaatcattttttaacacaagctgactcttcccttcccttctcctttccctggaaaaatacaatgaataaataaagacttattggtactcaaaaaaaaaaaaaaaaaa

SEQ ID NO: 405 - DNA, 2946 bp, Homo sapiens
ctaagctggggtccatggagcctgcacccgcccgatctccgaggccccagcaggaccccgcccggccccaggagcccaccatgcctccccccgagaccccctctgaaggccgccagcccagccccagccccagccctacagagcgagcccccgcttcggaggaggagttccagtttctgcgctgccagcaatgccaggcggaagccaagtgcccgaagctgctgccttgtctgcacacgctgtgctcaggatgcctggaggcgtcgggcatgcagtgccccatctgccaggcgccctggcccctaggtgcagacacacccgccctggataacgtctttttcgagagtctgcagcggcgcctgtcggtgtaccggcagattgtggatgcgcaggctgtgtgcacccgctgcaaagagtcggccgacttctggtgctttgagtgcgagcagctcctctgcgccaagtgcttcgaggcacaccagtggttcctcaagcacgaggcccggcccctagcagagctgcgcaaccagtcggtgcgtgagttcctggacggcacccgcaagaccaacaacatcttctgctccaaccccaaccaccgcacccctacgctgaccagcatctactgccgaggatgttccaagccgctgtgctgctcgtgcgcgctccttgacagcagccacagtgagctcaagtgcgacatcagcgcagagatccagcagcgacaggaggagctggacgccatgacgcaggcgctgcaggagcaggatagtgcctttggcgcggttcacgcgcagatgcacgcggccgtcggccagctgggccgcgcgcgtgccgagaccgaggagctgatccgcgagcgcgtgcgccaggtggtagctcacgtgcgggctcaggagcgcgagctgctggaggctgtggacgcgcggtaccagcgcgactacgaggagatggccagtcggctgggccgcctggatgctgtgctgcagcgcatccgcacgggcagcgcgctggtgcagaggatgaagtgctacgcctcggaccaggaggtgctggacatgcacggtttcctgcgccaggcgctctgccgcctgcgccaggaggagccccagagcctgcaagctgccgtgcgcaccgatggcttcgacgagttcaaggtgcgcctgcaggacctcagctcttgcatcacccaggggaaagatgcagctgtatccaagaaagccagcccagaggctgccagcactcccagggaccctattgacgttgacctggccgaggaggcagagagagtgaaggcccaggttcaggccctggggctggctgaagcccagcctatggctgtggtacagtcagtgcccggggcacaccccgtgccagtgtacgccttctccatcaaaggcccttcctatggagaggatgtctccaatacaacgacagcccagaagaggaagtgcagccagacccagtgccccaggaaggtcatcaagatggagtctgaggaggggaaggaggcaaggttggctcggagctccccggagcagcccaggcccagcacctccaaggcagtctcaccaccccacctggatggaccgcctagccccaggagccccgtcataggaagtgaggtcttcctgcccaacagcaaccacgtggccagtggcgccggggaggcagaggaacgcgttgtggtgatcagcagctcggaagactcagatgccgaaaactcgtgcatggaacccatggagaccgccgagccacagtcctcgccagcccactcctcgccagcccactcctcgccagtccagtctctgctgagagcacaaggagcctccagcctgccctgtggcacataccaccccccagcttggcctccccaccagcccgctgagcaggctgccacccccgatgctgagcctcacagcgagcctcctgatcaccaggagcgccctgccgtccaccgtgggatccgctacctgttgtacagagcacagagagccatccgccttcgccatgccctccgcttgcaccctcaattgcatcgggcccctattcggacttggtctccccatgtggtccaagccagcactcctgccatcacagggcccctcaaccatcctgccaatgcccaggaacatcctgcccagctgcaaaggggcatcagcccaccccaccggatacgaggggctgtgcgatcccgcagccgctccctccggggctcctcccatttatcccagtggctcaacaacttttttgccctccccttctcctccatggcttcccagcttgacatgtcttccgtggtgggggcaggggaaggcagagcccagactcttggagcagttgttccccctggggactctgtcagaggctccatggaggcctctcaagtccaagtgcctctggaagcctctccaattacattcccaccaccctgtgccccagaaaggccccccatcagcccagtcccaggcgcccgtcaagcaggcctctgagagtgctacccttctcttgtaaccttgcagccaacacccctgcccggcccctgagctgcctcctccagcccatgctcttacaggccctgcacagagtagcactcattaattcttggttaaggaatgaatcaacgaatgaatggctatgcatggacctctgggcagggagacctgggtcttctctggctgagaggggaaggctaaggcatggctgagattcaagccaccattccaggcctctttgcccaagaaagaaacttctgtcacccttgcactctcctgtgttctgagtccctggccaatagcacagccttccatgccccgacccccaccccaagcctctccactaggcctctgccaggatctaagcccatgagcacagggactggctatcccaagacctggcagatgtggctgctcaataaacacttgttgaaccatcaaaaaaaaaaaaaaa

SEQ ID NO: 406 - DNA, 2070 bp, Homo sapiens
  misc_feature (1683)..(1683): "n"=a, t, c or g.
gaattcggggcgccagctacgccgctgccgctgtcactatggcccattacaaagccgccgactcgaagcgtgagcagttccggaggtacttggagaagtcgggggtgctggacacgctgaccaaggtgttggtagccttatatgaagaaccagagaaacctaacagtgctttggattttttaaagcatcacttaggagctgctactccagaaaatccagaaatagagctcgttcgcctagaactggccgaaatgaaagagaagtatgaagctattgtagaagaaaataaaaaactgaaagcaaagcttgctcagtatgaaccacctcaggaggagaagcgtgctgaataggattcttctcagtttgaaagacaatgaaaaatggttttgtatgacttgaatagtttgtatagtatataatcttttctgaacagatgctatagaactcttttaatatgtttaattcacctatcacactctgttaaaaacacatagaatcatcaataaaaactcaatataactttctttgggtcttaaagcaggagaatccaaagtaaatcctgaacaaaacctaaacacagccatctaactcattaccttaaaagacattctgtttattagtctgattaggaatgatggcactggttgtattttagccaagacagtttagcatggagctattccttggtgcagttcaggatatgaacacaggtacagtcattctttgaacggtgacactgttctgtatattccctataggcagctggagagatctgtgtgacacaagatgcttttgtacgggttcccatgaatcttctgctcttgtttgtgtgacatgaaacaaataacttctttgccaccactttgccttagataactgtgtgtgtgtgtgccagtttgaactctgacaccacattttccttctatgcaatcatgcctgtctgataatcttgcattgctttcctctgagctttagtgggtcctagtgcacaatggcctttctgtgctgtttttcaatttgcctaataatagcagttaccctgattgtaatttatgtaactttaaacaggatcacactgtaccccctgcctgccttatttgcttactgagcacaggacagaggcaatatacaactctgggttcacacacaagctgagatgagaagaggaatgagccatatattggggaaaatcatagtttgtaggtataattatatagtgcttttctccctcaaagtatttttctagccttgaattcattttatcttcattatccctgtgaagtaggtgggacaagtataaggggaagaggggtgctgaatttttaggccaaagactgatattaatacaaatcactcactaactgtagagccttgggcattatcagtgaactactctgagatttactgtcttcatctgtttaatgagtagaatgtccgtgatgcctacctcacagggttgttgtgagggtcaaatgagaatgtatgtgaaagatttgtaaatggtaaagcactatattcttgtttgttagtcctttttcctttctttgggtagacctacagtcagatgttttgttttatggatcacttattttccttactggtagactgtcgttttatagacatattcctatttcatatattctctccctgttgttagagaacctatctttgtttttggtcaanacacacatagaaaacaaaatgatccaatgaaaactggtttaactagcaaaagccttggcacctgttggagactatgaccaagccaataaaaagggcatttaaatcagccctgttagtaggaatgtggctatggctggtgcctcttctagtcacaagtttgtttttggagggggtccagaagatcattcccttgcatagatttctcttttaccaatttgagtgcctcctacatgggcagcagtggactaagtgctgggtgtgataaagaggaatgacttaattatgagactgtatataatcaaatacagtgtgggttaggacctgtggcagaccattataataaagcatggccccgtgagggttttgaaagagaaaaaaaaaaaaaaa

SEQ ID NO: 407 - DNA, 1830 bp, Homo sapiens
ggggagttgaaacctaattttgtggcgtagcagctatgcagcttgaaatccaagtagcactaaattttattatttcgtatttgtacaataagcttcccaggagacgtgtcaacatttttggtgaagaacttgaaagacttcttaagaagaaatatgaagggcactggtatcctgaaaagccatacaaaggatcggggtttagatgtatacacataggggagaaagtggacccagtgattgaacaagcatccaaagagagtggtttggacattgatgatgttcgtggcaatctgccacaggatcttagtgtttggatcgacccatttgaggtttcttaccaaattggtgaaaagggaccagtgaaggtgctttacgtggatgataataatgaaaatggatgtgagttggataaggagatcaaaaacagctttaacccagaggcccaggtttttatgcccataagtgacccagcctcatcagtgtccagctctccatcgcctccttttggtcactctgctgctgtaagccctaccttcatgccccggtccactcagcctttaacctttaccactgccacttttgctgccaccaagttcggctctaccaaaatgaagaatagtggccgtagcaacaaggttgcacgtacttctcccatcaacctcggcttgaatgtgaatgacctcttgaagcagaaagccatctcttcctcaatgcactctctgtatgggcttggcttgggtagccagcagcagccacagcaacagcagcagccagcccagccgccaccgccaccaccaccaccacagcagcaacaacagcagaaaacctctgctctttctcctaatgccaaggaatttatttttcctaatatgcagggtcaaggtagtagtaccaatggaatgttcccaggtgacagcccccttaacctcagtcctctccagtacagtaatgcctttgatgtgtttgcagcctatggaggcctcaatgagaagtcttttgtagatggcttgaattttagcttaaataacatgcagtattctaaccagcaattccagcctgttatggctaactaaaaaaaagaaaatgtatcgtacaagttaaaatgcacgggcccaagggggattttttttttcacctccttgagaatttttttttttaagcttatagtaaggatacattcaagcttggttaaaaaaataataataaaacatgcatcatttttcatttgccaaccaagcacaaagttattttatactgactgtatattttaaagtatactctcagatatggcctcttacagtatttaagatatagcaaggacatggctgatttttttttataaaaattggcactaataagtgggtttattggtcttttctaattgtataatttaatttagtacaaagtttgtaaaatatcagaggatatatatatattgtttctacgacatggtattgcatttatatctttttactacagtgatctgtgacagcagcagcttcatgttgtattttttttactgaaattgtaaaatatccatcttaaagacatcaactattctaaaaattgtgtacaggatattcctttagtggtggaattaaaatgtacgaatacttgctttttcaaaaaaatgtattttctgttaaaagtttaaagatttttgctatatattatggaagaaaaatgtaatcgtaaatattaattttgtacctatattgtgcaatacttgaaaaaaacggtataaaagtattttgagtcagtgtcttacatgttaagagggactgaaatagtttatattaagtttgtattaaaattctttaaaattaaaaa

SEQ ID NO: 408 - DNA, 8864 bp, Homo sapiens
tagaagcattttctttggcagcaagaagataattttatagaagccatgcctgttcttggggttgcctcaaaactgaggcagccagctgttgggtcaaagcctgtgcatactgctcttccgataccaaatcttggcactactgggtcacagcactgttcttcaagacctttggaacttgctgaaacagagagctccatgctttcttgtcagcttgcgttaaaatcaacctgtgaatttggagagaagaaacccctccaaggaaaagccaaggagaaagaagacagcaagatttacactgactgggccaaccactacctagcaaaatcaggccacaagcggctgatcaaggacttgcaacaagacattgcagatggagtactcctagcagaaatcatccagattattgcaaatgaaaaagttgaagatatcaatggatgtcctagaagtcagtctcagatgattgaaaatgttgatgtctgccttagttttctagcagccagaggggtaaatgttcaaggtctatctgctgaagaaataagaaatggaaacttaaaagccattctagggctgtttttcagtttatctcgctacaagcagcaacaacaccatcaacaacagtactatcagtccttggtggaacttcagcagcgagttactcacgcttcccctccatcggaagccagccaggccaaaacccagcaagatatgcagtccagtctggcagccagatatgcaactcagtctaatcacagtggaattgcaaccagtcaaaaaaagcctactaggcttccagggccctctagggtgcctgctgcaggaagcagcagcaaggtccagggagcctctaatttaaataggagaagtcagagctttaacagcattgacaaaaacaagcctccaaattatgcaaatggaaacgaaaaagattcctccaaaggacctcaatcgtcttcaggtgtaaatggtaacgtgcagcctcccagtactgctgggcagcctcctgcctctgccatcccttctccaagtgccagcaagccctggcgcagcaagtccatgaatgtcaaacacagtgccacctccaccatgttgactgtaaagcagtcaagtacagccacctcccccacaccatcttcagacagactgaagccacctgtctcagaaggggtcaaaactgctccctcaggacagaaatccatgcttgagaaattcaagctagtcaatgcccggactgctttacgccccccgcagcctcccagttcaggacctagtgatggtgggaaggatgatgatgccttttctgaatctggtgaaatggaaggttttaacagtggtctgaatagtggtggctcaacaaatagcagtcccaaagtgtcacctaagttggcccctccaaaagctggaagcaaaaatctcagcaataaaaagtctttgctacagccaaaggaaaaagaagaaaagaacagggacaaaaataaagtttgcactgaaaaaccagtcaaagaagagaaggatcaggtgacagagatggctccaaaaaagacctccaaaattgcaagcttgatccctaagggcagcaagacaacagcagctaagaaggaaagcttaattccgtcttccagtggtattccaaaaccaggctctaaagttccaacagtaaagcaaaccatttcacctggcagcacagcaagcaaagagtctgagaaattcaggactaccaaggggagcccttcccagtccttatctaagcctataaccatggagaaagcaagtgcttctagttgtcctgcccctttggaaggaagggaagctggccaagcttctccttctggttcctgtaccatgacagtggcacaaagcagtgggcagagcacaggaaatggtgctgtccaactccctcaacagcagcaacatagccacccgaataccgcgacagtggcaccattcatttacagggcacattcagaaaatgaaggtaccgctttaccatcggctgactcctgtaccagtcctacaaagatggacttatcatatagtaagactgctaagcagtgcctggaggagatatctggtgaaggccctgaaacaagaagaatgagaacagttaaaaacatagcagacttgaggcagaatttagaagagactatgtccagtcttcgtgggactcagataagccacagcaccctggagacaacatttgacagcactgtgacaacagaagttaatggaaggaccatacccaacttgacaagtcgacccacccccatgacctggaggttgggccaggcatgtccgcgacttcaggcgggagatgctccctccctgggtgctggctatcctcgcagtggtaccagtcgattcatccacacagacccctcgaggttcatgtataccacgcctctccgtcgagctgctgtctctaggctgggaaacatgtcacagattgacatgagtgagaaagcaagcagtgacctggacatgtcttctgaggtcgatgtgggtggatatatgagtgatggtgatatccttgggaaaagtctcaggactgatgacatcaacagtgggtacatgacagatggaggacttaacctatatactagaagtctgaaccgaataccagacacagcaacttcccgggacatcatccagagaggggttcacgatgtgacagtggatgcagacagctgggatgacagcagttcagtgagcagtggtctcagtgacacccttgataacatcagcactgatgacctgaacaccacatcctctgtcagctcttactccaacatcaccgtcccctctaggaagaatactcagctgaggacagattcagagaaacgctccaccacagacgagacctgggatagtcctgaggaactgaaaaaaccagaagaagattttgacagccatggggatgctggtggcaagtggaagactgtgtcctctggacttcctgaagaccccgagaaggcagggcagaaagcttccctgtctgtttcacagacaggttcctggagaagaggcatgtctgcccaaggaggggcgccatctaggcagaaagctggaacaagtgcactcaaaacacccgggaaaaccgatgatgccaaagcttctgagaaaggaaaagctcccctaaaaggatcatctctacaaagatctccttcagatgcaggaaaaagcagtggagatgaagggaaaaagcccccctcaggcattggaagatcgactgccaccagctcctttggctttaagaaaccaagtggagtagggtcatctgccatgatcaccagcagtggagcaaccataacaagtggctctgcaacactgggtaaaattccaaaatctgctgccattggcgggaagtcaaatgcagggagaaaaaccagtttggacggttcacagaatcaggatgatgttgtgctgcatgttagctcaaagactaccctacaatatcgcagcttgccccgcccttcaaaatccagcaccagtggcattcctggccgaggaggccacagatccagtaccagcagtattgattccaacgtcagcagcaagtctgctggggccaccacctcgaaactgagagaaccaactaaaattgggtcagggcgctcgagtcctgtcaccgtcaaccaaacagacaaggaaaaggaaaaagtagcagtctcagattcagaaagtgtttctttgtcaggttcccccaaatccagccccacctctgccagcgcctgtggtgcacaaggtctcaggcagccaggatccaagtatccagatattgcctcacccacatttcgaaggttgtttggtgccaaggcaggtggcaaatctgcctctgcacctaatactgagggtgtgaaatcttcctcagtaatgcccagccctagtaccacattagcgcggcaaggcagtctggagtcaccgtcgtccggtacgggcagcatgggcagtgctggtgggctaagcggcagcagcagccctctcttcaataaaccctcagacttaactacagatgttataagcttaagtcactcgttggcctccagcccagcatcggttcactctttcacatcaggtggtctcgtgtgggctgccaatatgagcagttcctctgcaggcagcaaggatactccgagctaccagtccatgactagcctccacacgagctctgagtccattgacctccccctcagccatcatggctccttgtctggactgaccacaggcactcacgaggtccagagcctgctcatgagaacgggtagtgtgagatctactctctcagaaagcatgcagcttgacagaaatacactacccaaaaagggactaagatataccccatcatctcggcaggccaaccaagaagagggcaaagagtggttgcgttctcattctactggagggcttcaggacactggcaaccagtcacctctggtttccccttctgccatgtcatcttctgcagctggaaaataccacttttctaacttggtgagcccaacaaatttgtctcartttaaccttcccgggcccagcatgatgcgctcaaacagcatcccagcccaagactcttccttcgatctctatgatgactcccagctttgtgggagtgccacttctctggaggaaagacctcgtgccatcagtcattcgggctcattcagagacagcatggaagaagttcatggctcttcattatcactggtgtccagcacttcttctctttactctacagctgaagaaaaggctcattcagagcaaatccataaactgcggagagagctggttgcatcacaagaaaaagttgctaccctcacatctcagctttcagcaaatgctcaccttgtagcagcttttgaaaagagcttagggaatatgactggccgattgcaaagtctaactatgacagcggaacaaaaggaatctgaacttatagaactaagagaaaccattgaaatgctgaaggctcagaattctgctgcccaggcggctattcagggagcactgaatggtccagaccatcctcccaaagatcttcgcatcagaagacagcattcctctgaaagtgtttctagtatcaacagtgccacaagccattccagtattggcagtggtaatgatgccgactccaagaagaagaaaaagaaaaactgggtgaactctagaggaagtgagctgagaagttctttcaaacaagcctttgggaagaaaaagtccaccaagcctccttcatcacattctgacattgaagagcttactgattcatcccttccggcatcccccaagttaccccataatgctggtgactgtggctcagcatccatgaagccctcacaatctgcttcagcgtcaccccttgtctggccaccaaagaaacgacaaaatggccctgtgatctacaagcatagatctcggatctgtgaatgcacagaagctgaggcagagataattctgcagctgaagagcgagctcagagaaaaggaattaaaattaacggatattcggctggaggccctcagctctgctcatcatcttgatcagatccgggaagccatgaaccggatgcagaatgaaattgaaatactgaaagctgaaaatgaccggttgaaggcagaaactggtaacacagctaagcctactcggccaccgtcagaatcctcaagcagcacctcctcttcatcttccaggcagtcattaggactttctctaaacaatttgaacatcacagaggctgttagctcagatattttgctagatgatgctggtgatgcaactggacataaagatggccgcagtgtgaaaattatagtctccataagcaagggctatggtcgagcaaaggaccaaaaatctcaggcatatttgataggatccattggtgttagtggaaaaaccaagtgggatgtcttagatggtgtaataagacgtctctttaaggaatatgtattccgaattgatacatccactagccttggtctgagctctgactgcattgctagctactgtataggagacttaattagatcccataacctagaagtgcctgaattgctgccttgtggataccttgttggagataataacatcatcactgtgaacctcaaaggggtagaagaaaatagtttggacagttttgtttttgatacgctgattcctaaaccaattacccaaaggtactttaacttgttgatggagcatcacagaattatactctcaggaccgagtggtactggaaagacctatttggcaaacaaacttgctgaatatgtaataaccaaatctggaaggaaaaaaacagaggatgcaattgccacttttaatgtggaccacaagtcaagtaaggaattgcaacaatatctagctaacctggctgaacagtgcagtgctgataataatggagtggagctcccagttgtaataattcttgataatcttcatcatgtgggctctctgagtgatatcttcaatggttttctcaattgtaaatacaacaaatgtccatatattattggaacaatgaatcagggagtttcttcatcaccaaatctagagctgcatcacaatttcaggtgggtattatgtgcaaatcatacagaaccagtgaaaggctttttaggcagatatcttcgaagaaaactcatagagatagaaattgaaaggaacattcgcaataatgacctagtcaaaattatagattggattccgaagacgtggcatcatctcaacagttttttggaaacacacagttcttctgacgttaccattggtccccgactattccttccttgccccatggatgtagaaggttctagagtatggttcatggatctctggaactattctttagtaccttatattctggaggcagtgagagagggtcttcagatgtatgggaaacgcacaccatgggaagatccttcaaagtgggtgcttgacacatatccatggagctcagcaactctgcctcaggagagcccagccttacttcagctgcgaccagaagatgttgggtatgaaagctgcacatccactaaggaagccacaacctcaaagcacattccacaaactgacacagaaggagatcccctgatgaatatgctaatgaaactccaagaagcagccaattactcgagcacacaaagctgcgacagcgaaagcaccagccaccatgaagacattttggattcatctcttgaatctaccctctagagggtgaaaaaagttaagggaaaagactttgcttttaaaaaaatgtttcaaaagaaaggtattttcactaaaccactgccagtataaaagcaccctgtcaagggccctgacccagagttgtggtctccaaggaggcagcagaactaagtctgaaccgccaagatgctaaattgcaatggaagcttaactttagtttatttctaagcattttttatatctgtggagtaatagaaagctccattactcaactggaaaggaccctaatgacagggcaactgaacagattgcacatgggatagccaaactggactttctttgtttcctctttaaaagtttacaatgcagaccattttttgtcccttccttttgtttcctctgaggggctgttcgccccaggcagggtccatctttctgatctgtccaacctcctttgtgccacacggtgctggtcacagggcttcagtagtgtttgtgttgtgcgctcaccccattccagaacaaatccaagaggccagtcctccataagcacaaatggaattgtgcaaccaccagaaaaacactactgtggcaaactggagaagtgccaatttaattctaactgccacgttctcatgatgtgctccaccaactttttagtatatgagtcactggttttataaggttgtttttaccacagtggtctttttaaaccacctgcccactcccttaacaagagttttataccaattattagtcaacactgataaaaggcttttttagggctttatttgtttgagccttttcagtgaaagaaggaacatttcctatggtgctgtctcactgccttaaaacagatttctatgacagtttaacagttggtttaaatcctaaaccattggtaatttccactgtcttttcatttacaaccaagcaacaccagttaacatagtagcctcatctctatatatctttctcttttttttttttttgaagaaatggataggagaaagatcagtatttttagccttgtgaatagatcgctttgcctatcctccaaaatattaaaataacccagaaatgctctttgaccgtcacttaaaacctaagacatgtggcgaaattccatccagttctaagtgaaagagtttcagaaggcaggagattttgaattattatccagcagggctggaagcactagatgcagcatgagcacaactattcggctttccttccctattgtttttgtttttttaatgagttttgacgcatgttgttttgattgctattgttgtacatgagaaattcagcattaaagaacactgaagcggtaaggtcactgtggaagaggaagcgtttatactgtaaaagaaggttagatttgcacagtctactgggtaggtattgtaaataataatttttaaaacttgcacaaatcaaaacaaacacaaacaaaattgtattttatcctgttggtgttaagaggtgtttcacttgctgagatttcctgtacattgcaaacaaatacagaatgcaaaccctcaaagctgtattatctggtgtgtttgtcctgtatttacagttgtttttgactatgcaggagctatcagtgctagagtgagcatgcttcaaaactgtacatgaagccaatatatttttggataagtaaaaaaaaaaaaaaaaaa

SEQ ID NO: 409 - DNA, 7888 bp, Homo sapiens
cagacacacatggtgcattgttgccattccccagattgcatctttgaaacacaggctcttagtaaccttcagcgaacaaagaggcaacctcccagatacgtctgctgggagggagtcatcgtgactgccctctagcttttgctggatctggatttgaattccactatggagcctcgcatggagtcctgcctggcgcaggtgttgcagaaggatgtggggaaacgattgcaggttggccaagaactgatagactatttctcagacaaacagaagtctgctgaccttgagcatgaccagaccatgttagataaacttgtggatggacttgctacctcttgggtgaactctagcaattacaaggtggttctgctgggcatggacatcctgtccgccctggtgacccggctgcaggatcggttcaaggcgcagatcggcacagtgctgccaagtctaatagacagactaggagatgctaaagactctgtgagggagcaggaccaaactctgctgctaaagatcatggatcaagctgctaatccccagtacgtatgggacagaatgcttggaggcttcaaacacaagaatttccgtactcgagaaggcatctgtctctgccttatagcaacactcaatgcctctggagcacagactttaacactaagcaagattgtgccacatatatgcaacttacttggagatccaaacagccaggttcgagatgcagcaataaacagcttagtggaaatttacagacatgtaggagaacgtgtgagggcagatctcagtaaaaaaggattgccacagtcccggttgaatgtaatttttacaaaatttgatgaagtccagaaatctggaaacatgatacaatctgcaaatgataaaaatttcgacgatgaagattctgtggatggtaacagaccttcctctgctagttctacatcatccaaggctccaccaagttctcggagaaacgttggaatgggaaccacccgccggcttggttcatccacccttggatccaagtcttcagctgcaaaagaaggagctggtgctgttgatgaagaggattttattaaagcatttgatgatgtacctgtagtacagatttattccagccgagaccttgaggaatccataaacaaaattagggaaatattatctgatgacaagcatgattgggagcagagagtaaatgctctaaaaaagattagatctttacttttggctggtgctgctgagtatgataacttctttcaacatttgcgtcttttggatggagcctttaaactctctgctaaggacctgcggtctcaggtagtgcgggaggcttgtatcacgttggggcatctgtcatcagttctggggaataagtttgaccatggagctgaagccattatgccaactatctttaatttaattccaaacagtgccaaaattatggccacatctggtgttgtagctgttaggttaattattcggcacacacacatccctaggttaatacctgtcataacaagcaactgtacctctaagtctgtcgcagttagaaggcgctgttttgaatttttagatttgcttttacaagaatggcagacacattcactagaacgacacatatcagtattagctgaaacaataaagaagggaatacatgatgctgattccgaagcaagaatagaagccagaaaatgttactggggtttccacagtcacttcagcagagaagcagagcacttgtaccacaccttggagtcctcctaccagaaagccctgcagtcccacctgaagaactcagacagcatagtgtctctgcctcagtcagaccgctcatcttccagctctcaagagagtctaaatcgtccgctgtctgccaaaagaagtcctactggaagtaccacatctagagcttctacagttagtaccaaatctgtgtcaacgactgggtccctccagcgatctcgaagtgatattgatgtgaacgcagcagccagtgccaaatccaaagtctcctcatcttcgggcacgacgcctttcagctctgcagcagctttgcctccagggtcatacgcatccttaggtcggatccgcacaagacggcaaagctctgggagtgccaccaacgtcgcctctacacctgataaccggggccgcagtcgcgctaaagtggtttcacagtcccagcgatccagatctgctaatcctgctggtgctggcagccggtcaagttccccaggaaaattgttgggaagtggttatggtggacttactgggggctcctcacgaggcccacctgtgacaccgtcttcagaaaagcgaagcaagattcccaggagccagggatgtagccgggaaacaagtccaaaccgaataggattagcacggagcagccgtatccctcgacccagcatgagtcaggggtgcagccgcgataccagccgtgagagcagccgagatacaagccctgctcggggctttcctccacttgatcggtttgggcttggccagccaggaagaatacctggttctgtgaatgccatgagagttctgagcacaagtacagatcttgaagctgctgttgctgatgctttgaagaagcctgtgaggaggagatatgagccgtatgggatgtattctgacgatgatgccaacagtgatgcctcaagtgtttgctctgagcgctcatatggctccaggaatggtggcattccccattatctgcggcagactgaggatgtagcagaagttctcaaccactgtgctagttcaaactggtcagaaaggaaagaagggcttctgggcctgcagaacttactgaagagccaaagaacactgagtcgagttgaactgaaaaggttgtgtgagatcttcactcggatgtttgctgaccctcatagcaagagagttttcagtatgtttttggagactcttgtggattttataataattcataaggatgatttacaagactggctttttgttcttctcacacaattacttaagaaaatgggagcagatttacttggatctgtgcaagcaaaagttcaaaaggctctagatgtcacaagggactcctttccatttgatcaacaatttaacattttgatgagatttattgtggatcaaactcaaactccaaacctcaaggtcaaagttgcaatcctgaaatacattgagtctctggccagacagatggatccaacagattttgtaaactctagtgagacaaggcttgctgtttctagaatcataacctggacaacagaaccaaagagttcagacgtgagaaaggcagcacagattgtgctaatctctctgtttgaattgaatactcctgaatttaccatgttacttggtgccttgccaaaaacattccaggatggtgccaccaaactcctgcacaaccacctcaagaattccagtaacaccagtgtgggctctccaagcaatacgattggccggacgccctcccgacacaccagcagcaggaccagccccctgacctcacccaccaactgttcccatgggggtctgtctccaagtcggttatggggttggagtgccgacgggttagcgaagcacccacctcccttttctcagcctaactccatccccaccgctccctcccacaaggctctcaggcgctcttactctcccagcatgctggactatgatacagagaacctgaactctgaagaaatctatagttctctacgtggagttacagaagccattgaaaagtttagttttcgaagccaagaagatctgaatgagccaattaaacgagatggcaaaaaggagtgtgatattgtgtcccgcgatgggggcgctgcctcccctgccactgagggccgggggggtagtgaagtagaaggaggccggacagctctggataacaagacctcactactcaacacccagcctccgcgcgccttcccggggccgcgggcgcgagactacaacccgtacccctactcagatgccatcaacacctacgacaagaccgccctgaaagaggctgtgttcgatgacgacatggagcagcttcgagacgtgcccatcgaccattctgacctggtggctgaccttctgaaagagctgtccaaccacaatgagcgagtggaggaacggaagggagccctgctggagctgctcaagatcacgcgggaagacagccttggtgtctgggaggagcacttcaagaccattctgctcctgctgctggagacccttggagacaaagaccattcaattcgagcactggcgttaagagttttgagggaaattctgagaaatcaaccagcaagatttaaaaactacgccgagctgacgattatgaagactctggaagcccacaaagactcccataaggaggtggtgagagcggctgaggaggctgcgtccacactggccagttccatccacccggagcagtgcatcaaggtgctctgccccatcatccagacggccgactaccccatcaaccttgctgccatcaagatgcagaccaaagtcgtcgagaggatcgcaaaggagtcattgctgcagctccttgtcgacatcatcccaggcttgctgcagggttatgacaacaccgaaagtagtgtgcgtaaggccagcgtgttttgcttagtggcaatttattccgtaatcggagaagacctgaaacctcaccttgcacagctcacagggagcaagatgaagctactaaacttatacataaagagggcccagaccaccaacagcaacagcagctcctcctccgatgtctccacgcacagctaatggcagtacctgtctcttgtgtagacctagaagcaatcggtggtgcctctcagagacctttccccacccccttcatcggctgcccagtcagtacaaggaggcccacaaatatttattacaatcagtattttggtcccttccagcttttctgtagaatcttactggtattgaatgtaaaggaagcaaggcctgtattgcagtcttcatacaaaacaaaaggaataagaacagaaaagagccatactgaaacatgtcttgtacagcctgctgagatggcgaaaccctgtgtgtggggtgcagtttttaaaaatcagagcgctctagccactacttggtagaaagtagcattttttttttcagttaataacatatttgggggtggggtggggtgttactttgtgttcttcctccttagcctattttcttgtgcgtatggtctgtgtggggcccctttcacagctgacaccacgaaaggtgatatatctttaagttgtgttctgagacctactaaaaatgggaatcaagtcttggcaagaacagtctgaagatggccttttaacaaacgctgggaattttgcttgtcatatccagactggaggccgactgccctggctttcagcgtagaattgggagtgcaccctgacagtctccttccagctctccctaatcgactccaccgacaaggtccctaccccagagcttccatgcaaaggaattcttcaagtttaaatctggacacaaaaataagataaatgtatggcatcatttagggatgcctgagatggcagttcatgaagcacagaagataaagaagaagtctttcatctttactgctgagatccttgggaacactgttgtcatgggggctctgccaagaccctcatctctgggctacacggtgattcagattgagcaccaacttgtttcctcccctcaaagttctgcctaagccgttcagttctaacatggtctcagttaatctggtaaatggcatctttaccatcttagttctgacttctcagtttaatgtgggattaagagccaagaaaagcctagagagactggatatcacaattttttttaattttataaactgaagtagttccttgaatgtctgttgatgaaatagtcactgtttaaggaaaaaagtaattatgaggtgtagcagattgcagaaaaacaggattagaaacacacttaaaaagaacacacatttagagtctctcttcctcctcagcgaaccactaggcccccttttttaaaaacacctttagagcctaattactccaataaaagtaactagaggtttggagtctggttaaataaattctgagtaaaattcttaagccaaatggaaattcttaatgcaatcatgaggacttctattgtctcttactgttgtattagatcctataaattgaactgatttttccataaggaaaatgcttcttttgagattaattctaataacgtatttgctattgcagtgcagagcccactgcaactgctaggactgaaagcagaggctgggtgccagagcacgtgattcttaacatcatttccacagacccctctgccctgaccctctgcattggatgcaggaagctgggaaagactgatgttgatttggaaacatgggctgaaaatgaaggccccatagtgcataggaacagtaaagccagggtgctgacgtgtgtgtgtgtgtgtgtgtgtgtgtgtgtgtgtgtggtgttgtgtgtgtttgtgcgtgcaccctacacatgtgtggtacctcactgctgctgtttagggaacttgagggacgcgtttcaaggggttgggtattactgacgagctttggctcaaaatatagcaggaccaggtcttttgttgataagtactgtttgtttattaatatgtcattaatggtatttcttttttacactctacaagtgaattagggagtctcttgttgacccctttgttgcaggaatgtgcgtcgggctaggttatccatgagtttctttattcctaatgcagttagaaagacctttctccttgagctctttgactcccagaaggtaccccagtccccagtgtacttagaaaggatctcgaacattgctggacgtcctcatagtactcacaaagggctagccttgaatgtcactcgcccagtcttcagtctcctgacttagagatacaatcacgtcacaggtctcttggcctcaatctgaaaactgctgccgccgcgccgaggagactcgcatgccgccaccacctcactgggagggcgccgagcccaccgtcgccccctagaccctgacagctgcagctgccttgccttgccgccgcctccctgcagggcccctgttccaatgaaaaacagaacacaaaagagcagagcacctaagcctgtctctgcctccctgtctaccggactggccagggcccaagacccccgctgctccactgcggggctgggcgggctgactccctgcttcctccaagctgctgcctcccctgcagccagggtctgggcagggtgcagccggtcctcggggcacgcagcttccttcaagtacactgtgtgtgcttcccggacctgcggcgatgccacgggcctgccttttctatgcgcctcactagcttaccaccctgtgcaggtaatgcaactgactttgtctcatcagtctttttctttccctgccaccctttatttatcaagcgtaatgttacactttaaaggacagcaaataagaactttgtagaatcccaccaggactttgctaacaataatgtttggaaataaagaagtgctctgaaaaaatatcagccaccaaaatagttatgttggcactgtgttcacacgcatggtccccacacccccaggttgggtgggtttttttgttttttgggtttttttggggggggggctttttcatgttacatccatatctgtatttatatcttatttgtttcactttcaagtgtatcatggcaaatgtacagatttttttgttaataatgtgctaggatttgctaaaaaagaaaaaaaaaaaacccttttgagtttgccctagaataaatgagacttaatttaaaaaaaaaaaaaaaaaaaaaaaaa

SEQ ID NO: 410 - DNA, 5634 bp, Homo sapiens; identical to SEQ ID NO: 384

SEQ ID NO: 411 - DNA, 4328 bp, Homo sapiens
aagattatagagacttgctttagaaccacaagaagaaagaggaggccggcttttcagctagcatcatggcgtggccgtgcatcacgagggcctgctgcatcgcccgcttctggaaccagttggacaaagcggacatcgctgtgccgctggttttcaccaagtactcggaggccaccgagcacccgggcgccccgccgcagccaccgccgccgcagcagcaggcgcagccggcgctcgcgcccccctcggcgcgcgcggttgccatagagacgcagccagcccagggcgagttggatgcagttgcccgggcaacggggccagcgcctgggcctaccggcgagcgcgagccggcggcgggccccggccggagcgggccgggcccgggcctgggctccggctccacctccggccccgcggactcggtgatgcggcaggattaccgagcctggaaggtgcagcggcccgagcccagctgccggccgcgcagcgaataccagccctccgacgctcccttcgagcgcgagacccagtaccagaaggacttccgcgcctggccgctgccgcgccgcggggaccacccgtggatccccaagcccgtgcagatctctgcggcctcccaggcgtcggcgcccattctcggggcgcccaagcgccggccgcagagccaggagcgctggccagtgcaggccgccgctgaggcccgggagcaggaggcggcccccggcggagcgggtggcctggcggccggaaaggcgtccggggcggacgagcgcgacacgcgcaggaaggccgggcctgcctggattgtgcgccgcgccgagggcctggggcacgagcagacgccgctgcccgcggcccaggcccaggtccaggccaccggccccgaggctggcagggggcgcgccgcggcggacgccctcaaccggcaaatccgcgaggaggtggcgagtgcagtgagcagctcctacaggaatgaattcagggcatggacggacatcaagcctgtgaaaccaataaaggccaagccccagtacaagcccccagatgataagatggttcatgagaccagctacagtgctcagttcaaaggagaggccagcaagccaacaacagctgacaataaggtcattgatcgcagaagaatacgcagcctctacagcgaacccttcaaggaacccccaaaggtggaaaaacctagtgttcagagttccaaaccaaaaaagacctcagcgagccataagcccacgaggaaggccaaagacaagcaggcggtgtcaggccaggctgccaagaaaaagagcgcggagggcccgagtaccaccaagccagacgacaaggagcaaagcaaagagatgaacaataaactggctgaggcgaaagagtaaatttccctgcactttccttttactcttctctctctctccctccccccaactttttttttttaaaccaacaaaccaaaaaaggccacaaaattaattagaggcttctcatctgccttggtcctgagtgttccaggagctctttggtttggcttcttttgatggaagaatcctgcttcacagactgagtggcaggcctcctcctgagggcagcccctggagcaccaggaagcgttgccgctggctgtgccctcccctggcactctgactgcatgctgatgagcaaggcaggcaggtctgagaggcgaaacgaatctcccggcagtgcttggaagtgtctgtggggtctcctcctcccagatccccaagatctgtgtcactggtcgattttgaactttaggtacatgtgttcttttcaaaaattcagagaatcgtcatgtgccacagaagctcagcctgggcttcagcaattgacaaaatttgaagaaatattaaacaaaaataacaaaaaaagaaacaaccttggccttaatgtcaataaaagggagttgtgtctgttaagtggtcttttcatagaatcgtccattagaaatgtgtgcctgtgtttagcttcctatcagtgggctttaaattgtataccgagtcatagatacgccactgataactaaaactagatcagggctggtgaagaaggttaggtgttttaggtacattccagctgtcataggaagatcacagaaatgaggaggctgttttcctctgattctcctcggccgaccacctgtccaatgctgctggtttcgcagagcgaccggttggagatgtctgaggaagaaagttcaaggtgtagggatagtgtgtttggaatttgactttccatttctgagacccaagggggcgtagatgtagtggcaagtgtggcgatgtttactctcccttcctgaaccgctctggtctgctcctcagagagggcagcggtgccaggcctcaggtcagggagaatgtctgtgacttagctgcagactaggagactgccctgctaactaattagcaagcagctttgacctcattaatatataaaagcagctctcagtatattccgtgtcgtgtgtgtgtgtggccaaagcccccaagggtggcaagtgccaccttcgctgtgctagagttgtgttgtaggaattagtcagggagttgttgtgaaaaaaaaaaccccagtgcttgtgagggaactcaaaatagttaccagaaaaataatatttgccaatatgacgtgtatattgctcagcacactctgtatctcctgtccttaaaatcctcttgtccccggcattctgacacactgggctgccgtccggtgtcaagccccggcgcaggcttgctcttcttttacaatgaaaggggtgaagagtgagggtctcacagttccttacctcaaagtccctttaggtccttctggtttggaggaagtggagcctccacgaactctctcttactccgaccattcaggcagcaaagtctctgcttacatcattttggttgtcaccttggggctgagtgagaagtcttttgtaaattaattcggcgtgtgctacatgagccataattattaacagaacaggaatatcagaaacgaagttgttgatcaggcccactgcgaccttcctttctatctcagggtttaaaactgtgaggaaggagaagtatgaaggaaggtagaaaatgctggtgggtctccgtgtttatgagtcacagattttgaaagctatcaggaaatgactagagtggatcctggcactgattccaactctttgccagctaatcttaacatttagcagaaagctctagcaacatgatcttaattgtatccagaggatttgccaatgtatgttcagtctctcaagatttggcattagtcagacatgttgatgctagccacaatttggatttctccatagaataatcatttatttttgcagatcaaataaatcagagtttacaatgcacaggggatcatttatttagcattcccttgctagaagcccgtgtgccaggcactgtgctaggcgtggtgggcagtataaagaaatctgtctccacagccacacaaccagagggtgcacatgacttgatccctatgaccaagtcaagttggtgttgcccaaatcgcagtttgacataagggtcccacaggcttccccaccccccgcccccactcactgccccagggaccaacttcctaccctcacccaaggctttagaggacctgtagcatgtctttttcaacctgtcagtatccccttctgcttaacacacccactgagaaaaccctgtttgtagttcactttgactcttgaatgtgtcactttactggcaagagacttcctttgatttctactgtttacaaataaaactcagccagtctcattctatatcccaaacgtactgaatgaaactgattttggttccacaagcagtgtttgggtgttgccttcctgaaggtgaccaagcttccaaagctcgtcccactggcctctgtacatttccctgtggttctccgtccttccctggcgagggagctgggactgaagctttcccgctgtttccctgcctgcaaaagcagccccaagagctgcgcattggcttccctcagcaatctgtcctgtctgtgctcccattcggtccacatagctttctttgcctctctgaggcagacaggaagtgtctaattacgattttgtggcctgggttttgttgcataccacagattgtctatgtaacatgtagcgcacacctctcttggtgctatttcattcctgctgtaagagaatgacaaaaatattcatgtatagccaattgattgtgacgtgcttgtggtctgtgcttgctcagaaaaacaaacaaacaaacagtttttccaattataaataaatgctaaagacgaacacc

SEQ ID NO: 412 - DNA, 2961 bp, Homo sapiens
gcggccgcggaggaggaggaaggggaggagggcgaggcgggaggtgcaggagggaccctcgccatgggtccacgggcctagagtggcggaagataccggcctggtgccaaactggctactgctgcttcctgtggcctccatggctgaggactggctggactgcccggccctgggccctggctggaagcgccgcgaagtctttcgcaagtcaggggccacctgtggacgctcagacacctattaccagagccccacaggagacaggatccgaagcaaagttgagctgactcgatacctgggccctgcgtgtgatctcaccctcttcgacttcaaacaaggcatcttgtgctatccagcccccaaggcccatcccgtggcggttgccagcaagaagcgaaagaagccttcaaggccagccaagactcggaaacgtcaggttggaccccagagtggtgaggtcaggaaggaggccccgagggatgagaccaaggctgacactgacacagccccagcttcattccctgctcctgggtgctgtgagaactgtggaatcagcttctcaggggatggcacccaaaggcagcggctcaaaacgttgtgcaaagactgtcgagcacagagaattgccttcaaccgggaacagagaatgtttaagcgtgtgggctgtggggagtgtgcagcctgccaggtaacagaagactgtggggcctgctccacctgcctcctgcagctgccccatgatgtggcatcggggctgttctgcaagtgtgaacggagacgctgcctccggattgtggaaaggagccgagggtgtggagtatgccggggctgtcagacccaagaggattgtggccattgccccatctgccttcgccctccccgccctggtctcaggcgccagtggaaatgtgtccagcgacgttgcctacggggtaaacatgcccgccgcaagggaggctgtgactccaagatggctgccaggcggcgccccggagcccagccactgcctccaccacccccatcacagtccccagagcccacagagccgcaccccagagccctggccccctcgccacctgccgagttcatctattactgtgtagacgaggacgagctacagccctacacgaaccgccggcagaaccgcaagtgcggggcctgtgcagcctgcctacggcggatggactgtggccgctgcgacttctgctgcgacaagcccaaattcgggggcagcaaccagaagcgccagaagtgtcgttggcgccaatgcctgcagtttgccatgaagcggctgctgcccagtgtctggtcagagtctgaggatggggcaggatcgcccccaccttaccgtcgtcgaaagaggcccagctctgcccgacggcaccatcttggccctaccttgaagcccaccttggctacacgcacagcccaaccagaccatacccaggctccaacgaagcaggaagcaggtggtggctttgtgctgcccccgcctggcactgaccttgtgtttttacgggaaggcgcaagcagtcctgtgcaggtgccgggccctgttgcagcttccacagaagccctgttgcaggaggcccagtgctctggcctgagttgggttgtggccttaccccaggtgaagcaagagaaggcggatacccaggacgagtggacaccaggcacagctgtcctgacttctcccgtattggtgcctggctgccctagcaaggcagtagacccaggcctgccttctgtgaagcaagagccacctgacccagaggaggacaaggaggagaacaaggatgattctgcctccaaattggccccagaggaagaggcaggaggggctggcacacccgtgatcacggagattttcagcctgggtggaacccgcttccgagatacagcagtctggttgccaaggtccaaagaccttaaaaaacctggagctagaaagcagtagactggaggcttctacagactgtaggattcaagtctgcagggcaggcactcgggaagggaagatggatgtaaagtgtgggagaccgaggacacagtggagcccacgagcacgagctggaacccacgaggatggcctggaacccatgtcagtctctcaccacctccagcttcgatgatgtgggtgtcctgcagaagaagctggtgcccttcctcacagagttaaatatgcatctggcccaggaattagagaagctgaaaggatgatcctggggaaggtggagcagctgcaggcctggctgcaggcctgactactgcccacaccaacgaggtgatctagcagatacatggcaacgtgtgaactgcaacaacgcctggtgccccagcaccaaccttccaagtgtaaaaacaatgtgctgctgcttcacttccgccctccggttatcaagcaaaatgtctcttgtggcccatcttactggaagagagttccgggaaacatagcctcaccaaggtgacacattacaaagccaccctaccatgaatccgctcccaagggtctcactgctcacctgaggataactcaatataactatgttgctgaaaatgcaaagctgaagaccatggatttcatggtgattccagcaagtacagagattctatgaagcccacccagaaaaaacttgctggtcctggctatttttgtgtcatttattcaagtattgagaacctggcctgtggtaggcactgtacttaatactaggatacagaaatgcaaaagatacggcccatgcaattttattaaatgcatcaatatgtattacaaatggtgaatggatttccaactttatcatggaatttaatgctgaatatatagaattcagaaaattgttgggaggacagcccttttgtgaaccttgtttggggcacagtaggaattggaaataatttagtttctatctctaagctgttctattttaaaattatttttaaatttttattgtcccactt

SEQ ID NO: 413 - DNA, 3349 bp, Homo sapiens
ggtggactgagccgctcgggacagcggcaccggaggaggctcggagaagatgcggggctcggggccccggggtgcgggacaccggcggcccccaagcggcggcggcgacacccccatcaccccagcgtccctggccggctgctactctgcacctcgacgggctcccctctggacgtgccttctcctgtgcgccgcactccggaccctcctggccagccccagcaacgaagtgaatttattggattcacgcactgtcatgggggacctgggatggattgcttttccaaaaaatgggtgggaagagattggtgaagtggatgaaaattatgcccctatccacacataccaagtatgcaaagtgatggaacagaatcagaataactggcttttgaccagttggatctccaatgaaggtgcttccagaatcttcatagaactcaaatttaccctgcgggactgcaacagccttcctggaggactggggacctgtaaggaaacctttaatatgtattactttgagtcagatgatcagaatgggagaaacatcaaggaaaaccaatacatcaaaattgataccattgctgccgatgaaagctttacagaacttgatcttggtgaccgtgttatgaaactgaatacagaggtcagagatgtaggacctctaagcaaaaagggattttatcttgcttttcaagatgttggtgcttgcattgctctggtttctgtgcgtgtatactataaagaatgcccttctgtggtacgacacttggctgtcttccctgacaccatcactggagctgattcttcccaattgctcgaagtgtcaggctcctgtgtcaaccattctgtgaccgatgaacctcccaaaatgcactgcagcgccgaaggggagtggctggtgcccatcgggaaatgcatgtgcaaggcaggatatgaagagaaaaatggcacctgtcaagtgtgcagacctgggttcttcaaagcctcacctcacatccagagctgcggcaaatgtccacctcacagttatacccatgaggaagcttcaacctcttgtgtctgtgaaaaggattatttcaggagagagtctgatccacccacaatggcatgcacaagacccccctctgctcctcggaatgccatctcaaatgttaatgaaactagtgtctttctggaatggattccgcctgctgacactggtggaaggaaagacgtgtcatattatattgcatgcaagaagtgcaactcccatgcaggtgtgtgtgaggagtgtggcggtcatgtcaggtaccttccccggcaaagcggcctgaaaaacacctctgtcatgatggtggatctactcgctcacacaaactatacctttgagattgaggcagtgaatggagtgtccgacttgagcccaggagcccggcagtatgtgtctgtaaatgtaaccacaaatcaagcagctccatctccagtcaccaatgtgaaaaaagggaaaattgcaaaaaacagcatctctttgtcttggcaagaaccagatcgtcccaatggaatcatcctagagtatgaaatcaagtattttgaaaaggaccaagagaccagctacacgattatcaaatctaaagagacaactattactgcagagggcttgaaaccagcttcagtttatgtcttccaaattcgagcacgtacagcagcaggctatggtgtcttcagtcgaagatttgagtttgaaaccaccccagtgtttgcagcatccagcgatcaaagccagattcctgtaattgctgtgtctgtgacagtgggagtcattttgttggcagtggttatcggcgtcctcctcagtggaagttgctgcgaatgtggctgtgggagggcttcttccctgtgcgctgttgcccatccaagcctaatatggcggtgtggctacagcaaagcaaaacaagatccagaagaggaaaagatgcattttcataatgggcacattaaactgccaggagtaagaacttacattgatccacatacctatgaggatcccaatcaagctgtccacgaatttgctaaggagatagaagcatcatgtatcaccattgagagagttattggagcaggtgaatttggtgaagtttgtagtggacgtttgaaactaccaggaaaaagagaattacctgtggctatcaaaacccttaaagtaggctatactgaaaagcaacgcagagatttcctaggtgaagcaagtatcatgggacagtttgatcatcctaacatcatccatttagaaggtgtggtgaccaaaagtaaaccagtgatgatcgtgacagagtatatggagaatggctctttagatacatttttgaagaaaaacgatgggcagttcactgtgattcagcttgttggcatgctgagaggtatctctgcaggaatgaagtacctttctgacatgggctatgtgcatagagatcttgctgccagaaacatcttaatcaacagtaaccttgtgtgcaaagtgtctgactttggactttcccgggtactggaagatgatcccgaggcagcctacaccacaaggggaggaaaaattccaatcagatggactgccccagaagcaatagctttccgaaagtttacttctgccagtgatgtctggagttatggaatagtaatgtgggaagttgtgtcttatggagagagaccctactgggagatgaccaatcaagatgtgattaaagcggtagaggaaggctatcgtctgccaagccccatggattgtcctgctgctctctatcagttaatgctggattgctggcagaaagagcgaaatagcaggcccaagtttgatgaaatagtcaacatgttggacaagctgatacgtaacccaagtagtctgaagacgctggttaatgcatcctgcagagtatctaatttattggcagaacatagcccactaggatctggggcctacagatcagtaggtgaatggctagaggcaatcaagatgggccggtatacagagattttcatggaaaatggatacagttcaatggacgctgtggctcaggtgaccttggaggatttgagacggcttggagtgactcttgtcggtcaccagaagaagatcatgaacagccttcaagaaatgaaggtgcagctggtaaacggaatggtgccattgtaacttcatgtaaatgtcgcttcttcaagtgaatgattctgcactttgtaaacagcactgagatttattttaacaaaaaaagggggaaaagggaaaacagtgatttctaaaccttagaaaacatttgcctcagccacagaatttgtaatcatggttttactgaagtatccagttcttagtccttagtct

SEQ ID NO: 414 - DNA, 1000 bp, Homo sapiens
cgaggtggacgggcggcagtcaagcgccggcgttctctgccatcaccctttccttgccggccggcacttcggctgcagagttttgcccacgcttcgagacttagggagcagtgcctttcagaatttcagaatttgcccactcatctggtataactggttctgatggctgggaataaaggaagaggacgtgctgcttatacctttaatattgaggctgttggatttagcaaaggtgaaaagttacctgatgtagtgttgaaaccacccccactatttcctgatacagattataaaccagtaccactgaaaacaggagaaggtgaagaatatatgctggctttgaaacaggagttgagagaaacaatgaaaagaatgccttattttattgaaacacctgaagaaagacaagatattgaaaggtatagtaaaagatacatgaaggtataccaggaagaatggataccagattggagaagacttccaagagagatgatgccaagaaataaatgtaaaaaagcaggcccaaaacccaaaaaggcaaaagacgcaggcaaaggcacaccactcactaatactgaagatgtgttgaaaaaaatggtggaattggaaaaaagaggtgatggtgaaaaatcagatgaggaaaatgaagagaaagaaggaagcaaagagaaaagtaaagaaggtgatgatgacgatgacgatgatgccgcagaacaggaggaatatgatgaagaagagcaagaagaggaaaatgactacattaattcatactttgaagatggagatgattttggcgcagacgtgatgacaacatggatgaggcaacctattaggcatgaaatttttcaaaaaatatttttatgatgcagcttctgaacatttggacagacttgatttgtattttatttctgataaggaataagatcttgtttctgttgttttggacaaaatgttgttaccaaaatatcaaaaccactttgagtttacatacagttacctt

SEQ ID NO: 415 - DNA, 3671 bp, Homo sapiens
gaattccgacaaaacaaaagggagaaccttctcccggtagcagcggcaggaactgcaaacatgatggcggcagctcccatccagcagaacgggacccacactggggttcccatagacctggacccgccggactcgcggaaaaggccgctggaagccccccctgaagccggcagcaccaagaggaccaatacgggcgaagacggccagtattttctaaaggttctcatacctagttatgctgctggatctataattgggaagggaggacagacaattgttcagttgcaaaaagaaactggagccaccatcaagctgtctaagctgtctaagtccaaagatttttacccaggtactactgagcgagtgtgcttgatccagggaacggttgaagcactgaatgcagttcatggattcattgcagaaaaaattcgagaaatgccccaaaatgtggccaagacagaaccagtcagcattctacaaccccagaccaccgttaatccagatcgcatcaaacaaacattgccatcttccccaactaccaccaagtcctctccatctgatcccatgaccacctccagagctaatcaggtaaagattatagttcccaacagcacagcaggtctgataatagggaagggaggtgctactgtgaaggctgtaatggagcagtcaggggcttgggtgcagctttcccagaaacctgatgggatcaacttgcaagagagggttgtcactgtgagtggagaacctgaacaaaaccgaaaagctgttgaacttatcatccagaagatacaagaggatccacaaagtggcagctgtctcaatatcagttatgccaatgtgacaggtccagtggcaaattccaatccaaccggatctccttatgcaaacactgctgaagtgttaccaactgctgcagcagctgcagggctattaggacatgctaaccttgctggcgttgcagcctttccagcagttttatctggcttcacaggcaatgacctggtggccatcacctctgcacttaatacattagccagctatggatataatctcaacactttaggtttaggtctcagtcaagcagcagcaacaggggctttggctgcagcagctgccagtgccaacccagcagcagcagcagccaatttattggccacctatgccagtgaagcctcagccagtggcagcacagctggtggtacggcggggacatttgcattaggtagcctggctgctgctactgctgcaaccaatggatattttggagctgcttctcccctagctgccagtgccattctaggaacagaaaagtccacagatggatccaaggatgtagttgaaatagcagtgccagaaaacttagttggtgcaatacttggcaaaggagggaaaacattagtggaataccaggagttgactggtgcaaggatacagatctccaaaaaaggagaattcgtacctggcacaaggaatcggaaggtaaccattactggaacaccagctgcaacacaggctgctcaatatttaattacacaaaggatcacatatgagcaaggagttcgggctgccaatcctcagaaagtgggttgagtgccccagttacacatcagattgttttaacccctcctttaccccattttcaagaaggatgtactgtactttgcagaagtgaagtttttctgttattaatatataattatgcaaatgaatgcgactatgttgacaatgtgtatatgtaaataatatgtgttttaccagatgtttcatagaaagaattttttcttgatctgttttgttctctatactttgcttgtgtatatttgtcagaggtgtttctagtgtaagatttaagcctgccattttaccagcattattgtagtttaatgattgaatgtagacagggatatgcgtatagttttcagtattagttctagataacactaaattaactactgttaggttgagtatggtggggtcagtgacctaaaatggagtgaggccaaagcactgtcctgtaagtcttacttcctgcttagggcacagtgaagtaggaaacaatattttgaaaataagttttaaatttaaaatgatcaaaaagcaatatagttgcataaaagcactgtaaaatatttaaaaggttaaaactgtggaaaattatattggtaagtttacagatcaataaaagcacctgttctccatctgaactagacaatggaaataatgctgcatgctgccatggcccattcttcatcatttgtaagttcaacaaaagttctcacatggagtcccacctcttcagaggttgcacatttgtttttaagactgaattcactactgatcccatcgcctggccgagacagtcattactccattaacatcctcactgtttagacacataactgtggtacaggattggaaattataaacaaaagtgaaagtgccaacaaattattgatagctgataatgtttcatatctgcaactgcttgataagtatgttgcattttaagagcttataattgtgtataatttgttaacactagaaacctattagtattgtgaatgtagattttactgtgaagctatctgtgatttagctgtttgctcccatgatggagtctttgcagcatggcgctagcagccaatgcagtttctaatactcggtaatttgcatgttttgtggagcatttttatgtcaccaaccagacagtatttcctgcatgcttatttagaagaggcagcttatcttgagaggtagtgttatctacctttgtcaggctttttgacaggtcatttcagagtaagcctttgttcccaagacccaacaactgtcaccctcttctgtacctctcctgagtgccaactgtccaggccatttgacacaccatctgttaacctctgagtttgcccactcaaggccactcataggggcatcctagccctgtgcactcagcactcataggatcatccagactctcatgcggcatgcagtctaatcatgacaaataatgctgctactctgatatctggctgagcaactgaattacaaaagagaattacttccatctcaacttcaacccattgattacgtccatcctagcaagctaaatggcatcccagctgctcctttctgtgcaaccaattaaagaacaatgagtgtgatgctccatgtctgaatttcgtccagcctctctctgaactgtgatctttgtcctcatgaactttcccttttgttcattgaactatatggactcttcatttcatattgatttactgtgcaatttacttttggacattgagaacttgaaattatttcctgatcccttccccttccactattaataattcatttctgtcaaactgtaagagtagactcattttttttttttttagtttttaacattggactgttatttcatttagagttctctatctctaaatatttatttagagaatgattttaaaagggaatgatatgcttgtttaaatgaaagagaaaagctgtagtaaactgtgttaattggtaatgactatttatcgtcgatactctgtagctgtgtaagttttgacaaatagtgtatctcgtggaatcagtggttagcattgccgctattatatttactcattttatcattataaatgtgtttagttcatcatgtagcatcaaaa

SEQ ID NO: 416 - DNA, 1568 bp, Homo sapiens
aggcttgtgtagatcatgccgccagtagcggccctgactgccgaggaaacggtagcttaggacagttggctgttaagtgacactgattctccccgccccgcctgacccccgagaaggaggcttgtcccccgctgcgtgagggggtggggaagtgggtagtgaattcggatctacctgggaggggggagtggaagttcccgccccggagagcggcgaggcggcagccacagttgattatggaagattcccacaagagtaccacgtcagagacagcacctcaacctggttcagcagttcagggagctcacatttctcatattgctcaacaggtatcatctttatcagaaagtgaggagtcccaggactcatccgacagcataggctcctcacagaaagcccacgggatcctagcacggcgcccatcttacagaaaaattttgaaagacttatcttctgaagatacacggggcagaaaaggagacggagaaaattctggagtttctgctgctgtcacttctatgtctgttccaactcccatctatcagactagcagcggacagtacattgccattgccccaaatggagccttacagttggcaagtccaggcacagatggagtacagggacttcagacattaaccatgacaaattcaggcagtactcagcaaggtacaactattcttcagtatgcacagacctctgatggacagcagatacttgtgcccagcaatcaggtggtcgtacaaactgcatcaggagatatgcaaacatatcagatccgaactacaccttcagctacttctctgccacaaactgtggtgatgacatctcctgtgactctcacctctcagacaactaagacagatgacccccaattgaaaagagaaataaggttaatgaaaaacagagaagctgctcgagaatgtcgcagaaagaagaaagaatatgtgaaatgcctggaaaaccgagttgcagtcctggaaaatcaaaataaaactctaatagaagagttaaaaactttgaaggatctttattccaataaaagtgtttgattcctaagaaagaaaatatttttgtggacatgcataaaaattaaatggatttcctagtggagttttataaattaaaaggtcaaaactgaagctttttatttaggcttttccaaatcaaggataaatatcttacgcacgatatctagtgacagaggagaaagtggaaaatgacctcaaggaagctacgggcacaactggaagctttgtagaaattaaacatattcaaggagcaagaaatgaactttcagcagtctaaattttctaaataaccaatagttgccaatctaaaatggcagagaagatgaaatttgataaactgaattttttttaaaaatccatttaccctacaggtttgcatttgtttgctgaaatttacctttttttagttatatatatgtgtgtgtgtgtgtgtaatttctgccaataaattctaaattacaaaggtaagagaaaacctagtacattactaaatatataaagtatatgttctgattatgtaaaaaaaaaaaaaaaaaa

SEQ ID NO: 417 - DNA, 4275 bp, Homo sapiens
tgtccaccagctgagaaggacaaagggcggaaggcagctgcacagagcagggccacggccttgcacacagtccagggagcttttgtgcaggagccaggcctccccctgggtccccatgatgagagaatgggttctgctcatgtccgtgctgctctgtggcctggctggccccacacacctgttccagccaagcctggtgctggacatggccaaggtcctcttggataactactgcttcccggagaacctgctgggcatgcaggaagccatccagcaggccatcaagagccatgagattctgagcatctcagacccgcagacgctggccagtgtgctgacagccggggtgcagagctccctgaacgatcctcgcctggtcatctcctatgagcccagcacccccgagcctcccccacaagtcccagcactcaccagcctctcagaagaggaactgcttgcctggctgcaaaggggcctccgccatgaggttctggagggtaatgtgggctacctgcgggtggacagcgtcccgggccaggaggtgctgagcatgatgggggagttcctggtggcccacgtgtgggggaatctcatgggcacctccgccttagtgctggatctccggcactgcacaggaggccaggtctctggcattccctacatcatctcctacctgcacccagggaacaccatcctgcacgtggacactatctacaaccgcccctccaacaccaccacggagatctggaccttgccccaggtcctgggagaaaggtacggtgccgacaaggatgtggtggtcctcaccagcagccagaccaggggcgtggccgaggacatcgcgcacatccttaagcagatgcgcagggccatcgtggtgggcgagcggactgggggaggggccctggacctccggaagctgaggataggcgagtctgacttcttcttcacggtgcccgtgtccaggtccctggggccccttggtggaggcagccagacgtgggagggcagcggggtgctgccctgtgtggggactccggccgagcaggccctggagaaagccctggccatcctcactctgcgcagcgcccttccaggggtagtccactgcctccaggaggtcctgaaggactactacacgctggtggaccgtgtgcccaccctgctgcagcacttggccagcatggacttctccacggtggtctccgaggaagatctggtcaccaagctcaatgccggcctgcaggctgcgtctgaggatcccaggctcctggtgcgagccatcgggcccacagaaactccttcttggcccgcgcccgacgctgcagccgaagactcaccaggggtggccccagagttgcctgaggacgaggctatccggcaagcactggtggactctgtgttccaggtgtcggtgctgccaggcaatgtgggctacctgcgcttcgatagttttgctgacgcctccgtcctgggtgtgttggccccatatgtcctgcgccaggtgtgggagccgctacaggacacggagcacctcatcatggacctgcgccacaaccctggagggccatcctctgctgtgcccctgctcctgtcctacttccagggccctgaggccggccccgtgcacctcttcaccacctatgatcgccgcaccaacatcacgcaggagcacttcagccacatggagctcccgggcccacgctacagcacccaacgtggggtgtatctgctcaccagccaccgcaccgccacggccgcggaggagttcgccttccttatgcagtcgctgggctgggccacactggtaggtgagatcaccgcgggcaacctgctgcacacccgcacggtgccgctgctggacacacccgaaggcagcctcgcgctcaccgtgccggtcctcaccttcatcgacaatcacggcgaggcctggctgggtggtggagtggtgcccgatgccatcgtgctggccgaggaggccctggacaaagcccaggaagtgctggagttccaccaaagcctgggggccttggtggagggcacagggcacctgctggaggcccactatgctcggccagaggtcgtggggcagaccagtgccctcctgcgggccaagctggcccagggcgcctaccgcacagctgtggacttggagtctctggcctctcagctcacagcagacctccaggaggtgtctggggaccaccgcttgctagtgttccacagccctggcgagctggtggtagaggaagcacccccaccaccccctgctgtcccctctccagaggagctcacctaccttattgaggccctgttcaagacagaggtgctgcccggccagctgggctacctgcgttttgacgccatggctgaactggagacagtgaaggccgtggggccacagctggtgcggctggtatggcaacagctggtggacacggctgcgctggtgatcgacctgcgctacaaccctggcagctactccacggccatcccgctgctctgctcctacttctttgaggcagagccccgccagcacctgtattctgtctttgacagggccacctcaaaagtcacggaggtgtggaccttgccccaggtcgccggccagcgctacggctcacacaaggacctctacatcctgatgagccacaccagtggctctgcggccgaggcctttgcacacaccatgcaggacctgcagcgggccacggtcattggggagcccacggccggaggcgcactctctgtgggcatctaccaggtgggcagcagccccttatatgcatccatgcccacccagatggccatgagtgccaccacaggcaaggcctgggacctggctggtgtggagcccgacatcactgtgcccatgagcgaagccctttccatagcccaggacatagtggctctgcgtgccaaggtgcccacggtgctgcagacggccgggaagctggtggctgataactatgcctctgccgagctgggggccaagatggccaccaaactgagcggtctgcagagccgctactccagggtgacctcagaagtggccctagccgagatcctgggggctgacctgcagatgctctccggagacccacacctgaaggcagcccatatccctgagaatgccaaggaccgcattcctggaattgtgcccatgcagatcccttcccctgaagtatttgaagagctgatcaagttttccttccacactaacgtgcttgaggacaacattggctacttgaggtttgacatgtttggggacggtgagctgctcacccaggtctccaggctgctggtggagcacatctggaagaagatcatgcacacggatgccatgatcatcgacatgaggttcaacatcggtggccccacatcctccattcccatcttgtgctcctacttctttgatgaaggccctccagttctgctggacaagatctacagccggcctgatgactctgtcagtgaactctggacacacgcccaggttgtaggtgaacgctatggctccaagaagagcatggtcattctgaccagcagtgtgacggccggcaccgcggaggagttcacctatatcatgaagaggctgggccgggccctggtcattggggaggtgaccagtgggggctgccagccaccacagacctaccacgtggatgacaccaacctctacctcactatccccacggcccgttctgtgggggcctcggatggcagctcctgggaaggggtgggggtgacaccccatgtggttgtccctgcagaagaggctctcgccagggccaaggagatgctccagcacaaccagctgagggtgaagcggagcccaggcctgcaggaccacctgtagggaagggccccataggcagagccccagggcagacagaacctctgggacacacaccaagggcactcctgcaggtggcccggcctgaggttcccaggagcagcaaaggggcctgctgagctctggttaggttacagctggaggtgtgtatatatacacacacacacatgtatatacacatatatatgtgtatgtatatatatgtatatatatatggcttttcaataaccacctaaattttaacaaaggttccttctaagtggtagaacttggggtggtatttttaccttccttcttcatactttgctctttttcttaaatactcattaatgtgcatatatcattattttcagatgcagctatcattattccaaaatacaaaataaagaagataaaataaattatatacccgagccatt

SEQ ID NO: 418 - DNA, 4744 bp, Homo sapiens
aaataataaagaaattgaaaacaatacattaatataccataacactaaaaagagcaggagcgagagatgagaaagggaatccagcccgctctggagcagtacctggtgaccgccgggggtggggagggggcggctgtcgtcgccgccgccgctgcagcctccatggacaaaagggcactgctagccagccccggcttcgccgccgccgccgccgctgccgccgccccgggcgcgtacatccagatcctcaccacgaacacttccaccacctcctgttcctcctccctccaaagcggcgccgtagccgccggccccctcctccccagtgcccccggcgcggagcagaccgccggcagcctcctctacaccacgccgcacggaccctccagcagagccgggctgctgcagcagccaccagcgctgggacgcggcggcagcggcggcggcggcggccctccggcaaagcgaaggctggagctaggagaaagcggtcatcagtacctctcagatggtttaaaaacccccaagggcaaaggaagagctgcactacgaagtccagatagtccaaaaactccaaaatctccctcagaaaaaacgcggtatgatacgtctcttggtctgctcaccaagaagttcattcagctcctgagccagtcacccgatggggtattggatttgaacaaggcagcagaagtgctaaaagtgcaaaagagaaggatttatgatatcaccaacgttctggaaggcatccacctcattaagaagaagtctaaaaacaacgtccaatggatgggctgcagtctgtctgaggatgggggcatgctggcccagtgtcaaggcctgtcaaaagaagtgaccgagctcagtcaggaagagaagaaattagatgaactgatccaaagctgcaccctggacctcaaactgttaaccgaggattcagagaatcaaaggttagcttatgttacatatcaagatattcgaaaaattagtggccttaaagaccaaactgttatagttgtgaaagcccctccagaaacaagacttgaagtgcctgactcaatagagagcctacaaatacatttggcaagtacccaagggcccattgaggtttacttatgtccagaagagactgaaacacacagtccaatgaaaacaaacaaccaagaccacaatgggaatatccctaaacccgcttccaaagacttggcttcaaccaactcaggacatagcgattgctcagtttctatgggaaacctttctcctctggcctccccagccaacctcttacagcagactgaggaccaaattccttccaacctagaaggaccgtttgtgaacttactgcctcccctgctgcaagaggactatctcctgagcctcggggaggaggaaggcatcagcgatctcttcgatgcttacgatttggaaaagctcccactggtggaagacttcatgtgtagttgattatgcttcgtgtgaactctccttaaaaaccgatatttttttatcatggaccagaacatctgtcatgcagtgttgtcccttcctaccttcttcctccaagagagtatcatgaagtaaactacaaacttcagaagaaagctgacattttaatgaattttttaaaaaattaataaacaaattgtctaaacgcacagttgcaggctcccttgggaaagccctgctttgctccaggctccaagatctcctggctaagtcagcaagtgagaaaatgtgcaatcaggtgtctctcaccccgaattgtccttcctccttcctccccggattggcttgctgtgcctgacggatgggctgtagaatggggtctggccacctggcctgctgggaaacagcaatcttccttaatagcatttcaagccgtgccttctccgcagaatgcatgtctttgaggtctgctaatatggaatggaactgcagcaaatgcaaacttgaagtcatgcaaaagtatgaaatggatttcttcagctcttcttaggaatatttaaattactgtcataattcagtttaagctatgaactgtgtgtcccagtaggaggtcaagaaaacctccacagccttctggatgaagaacctgttttcaaatatacttgttgcagatacagaagactagtagagttctgccactctaagctgttgtggattttcctgtctccatgaaccactcccattcccccgtccccaatgtgtttgtgagtttccagttgatttgtagcaaatgcctacttagttctttgtggattgttctagacttttaatttttttagctgccatttaagcattcctgtggcacccatcaccatttcaatttaattgtttactttgaagcggtttttgcaaattcatattacttaagcagagggagagaacctctactgatcagagcatctaaacctgtgtgatctaaggtttatcagcctctgcaaggagctttgtcccatcgtgcttccattcccaggagggggagcttggagcgagtcagtcctggggcttgctgacatgggtggcccattggaaaggagaaccaggtcagatgatgtaacagccccaaggagcagcaggcatgggtccctccatccttgggcttcccgggcccctgtgacaggggaaagggctctcttacaccgcactcagggagaccacttctcaggatggggtcagatggagagacctctagggagaaagacatccccattgtgtgagtggcatttccttaagctggcaggaacagggagcagccctgtgtcgggggctggaatagttctggccagaccccgttccccttcctctatgaaggaataagttggaccaagggaagtcggggacgtaaaaaatgaagcaaaacaatgccagggtgtctcccgctttactcttcaggaatggtgtcccaagttggaggctttgtgtcagctgcaaatcctaccagttatgtccaagaatggctttccctcgggcaggtggcagcggccatctcccactgggaatatggcgtagtatctccggtccattccttggatgctaaggactgcgggaatgagggagtcagataaagaacaaacctcgaaacgaacagttaaattgaaatgctatgtgcctgacccaatggtaggcacatagtaggcactcaactcatatgtttaattgaattgaaaatatcccttaggaaaaaaaaaaaacacacaaaaaaccacaagagccccagccagtttactccaggtagatttccacaatatgcaaagtggtggtggggtcaagacagatgacaccagcactttaaactctttgtgtgggtatgcgtgggtgtatgtttgggaagaaaaacaaaggtgcagactatcttcctttttttcttcttcagcctccatccctggcctcctcccctcacacacactggacttggtacaaaatgtcggtgtggtcctagatgaagcattggggtgggggagggagagggagctttgtgttaagtgcctactggaaatgcactgtggggttttttcctgtatgggaaaccatttatgccaagcttttccccatttcccatatttatctcatctggttagctgcctctgcttccagctttgtgtaattctctttgccagctgcacaaagctgattttttccaaagtctaaagactgagctcacctggctagattgttgtgtgttttgttgaattttttcataatgtaatgccgtatttattgtttttaaaatgaaaggaatactaataagtcttaaaagttccttcatgcataagatttttttccagttactgggcttaactggtgtacattaattagatgtccatactgtattttgtttgcattaagtaattttctttttgacttagtatccggcacacaaagtgggttagtactacagtatttgcgttactttaagtactaagtatgcaggtttcctggtaccattgagttgctgctattaaagctcacacacgaaatggctaaaagttacaagtgtgcaaattatgactgcgtgagccttagaaaataaaatgtataaagggcaacacatgagctgtcaaacagtgttaggagtgtgtttatatgtacagagttgtgcatagcaatcgttttatttaagttgatatgtagtctactcacattttcattatttagcaattttgtacaaaaatagcaattaatttgtaaacactgccagaatactttctagctgctttgtaattttttaagagtgttattttgtttttgtttttctgttctttgttgtggctcttgttttcatttttgttgtacgtgtagatctgtaaataaaattgcagtatttaaagcttaagctttcaggaaaaagaaaataagaattcagtgtgtgcatgacaactcgtgtgtatgagaaggagggatatgaaggaagatggcttgcagagtaagtcgggtggcaattgtcagggtgtgggaatttcttttcctacggggtacgtgattttgtaaaaaggaagtatttctcccaaaattgggagtaggcaaactactaatcagtttagctttgtgttgtatgctagtttaaaaaagaaaatatgtaatataatgtaaaaaaaaacaaaaaaaagcttttatgatggattttgtaaatagatttgttacagggtgacctgttctctagctgtgatcttaccacttcaaatgggtgtaatttgaataaattttgtatggtaaaggatcaataaaatgattttttttaaga

SEQ ID NO: 419 - DNA, 2507 bp, Homo sapiens
cagcacaccccggcacctcctctgcggcagctgcgcctcgcaagcgcagtgccgcagcgcacgccggagtggctgtagctgcccggcgcggcgccgccctgcgcgggctgtgggctgcgggctgcgcccccgctgctggccagctctgcacggctgcgggctctgcggcgcccggtgctctgcaacgctgcggcgggcggcatgggataacgcggccatggtgcgccgagatcgcctccgcaggatgagggagtggtgggtccaggtggggctgctggccgtgcccctgcttgctgcgtacctgcacatcccaccccctcagctctcccctgcccttcactcatggaagtcttcaggcaagtttttcacttacaagggactgcgtatcttctaccaagactctgtgggtgtggttggaagtccagagatagttgtgcttttacacggttttccaacatccagctacgactggtacaagatttgggaaggtctgaccttgaggtttcatcgggtgattgcccttgatttcttaggctttggcttcagtgacaaaccgagaccacatcactattccatatttgagcaggccagcatcgtggaagcgcttttgcggcatctggggctccagaaccgcaggatcaaccttctttctcatgactatggagatattgttgctcaggagcttctctacaggtacaagcagaatcgatctggtcggcttaccataaagagtctctgtctgtcaaatggaggtatctttcctgagactcaccgtccactccttctccaaaagctactcaaagatggaggtgtgctgtcacccatcctcacacgactgatgaacttctttgtattctctcgaggtctcaccccagtctttgggccgtatactcggccctctgagagtgagctgtgggacatgtgggcagggatccgcaacaatgacgggaacttagtcattgacagtctcttacagtacatcaatcagaggaagaagttcagaaggcgctgggtgggagctcttgcctctgtaactatccccattcattttatctatgggccattggatcctgtaaatccctatccagagtttttggagctgtacaggaaaacgctgccgcggtccacagtgtcgattctggatgaccacattagccactatccacagctagaggatcccatgggcttcttgaatgcatatatgggcttcatcaactccttctgagctggaaagagtagcttccctgtattacctcccctactcccttatgtgttgtgtattccacttaggaagaaatgcccaaaagaggtcctggccatcaaacataattctctcacaaagtccactttactcaaattggtgaacagtgtataggaagaagccagcaggagctctgactaaggttgacataatagtccacctcccattactttgatatctgatcaaatgtatagacttggctttgttttttgtgctattaggaaattctgatgagcattactattcactgatgcagaaagacgttcttttgcataaaagacttttttttaacactttggacttctctgaaatatttagaagtgctaatttctggcccacccccaacaggaattctatagtaaggaggaggagaaggggggctccttccctctcctcgaatgacgttatgggcacatgccttttaaaagttctttaagcaacacagagctgagtcctctttgtcatacctttggatttagtgtttcatcagctgtttttagttataaacattttgttaaaatagatattggtttaaatgatacagtattttaggtatgatttaagactatgatttacctatacattatatatattttataaagatactaaaccagcatacccttactctgccagagtagtgaagctaattaaacacatttggtttctgaataaattgaactaaatccaaactatttcctaaaatcacaggacattaaggaccaatagcatctgtgccagagatgtactgttattagctgggaagaccaattctaacagcaaataacagtctgagactcctcatacctcagtggttagaagcatgtctctcttgagctacagtagaggggaagggattgttgtgtagtcaagtcaccatgctgaatgtacactgattcctttatgatgactgcttaactccccactgcctgtcccagagaggctttccaatgtagctcagtaattcctgttactttacagacaggaaagttccagaaactttaagaacaaactctgaaagacctatgagcaaatggtgctgaatactttttttttaaagccacatttcattgtcttagtcaaagcaggattattaagtgattatttaaaattcgtttttttaaattagcaacttcaagtataacaactttgaaactggaataagtgtttattttctattaataaaaatgaattgtgacaaaaaaaaaaaaaaaaaaaaaaaaaaaaaaaaaaaaaaaaaaaaaaaaaa

SEQ ID NO: 420 - DNA, 1774 bp, Homo sapiens
agatcttgaaaacacccgggccacacacgccgcgacctacagctctttctcagcgttggagtggagacggcgcccgcagcgccctgcgcgggtgaggtccgcgcagctgctggggaagagcccacctgtcaggctgcgctgggtcagcgcagcaagtggggctggccgctatctcgctgcacccggccgcgtcccgggctccgtgcgccctcgccccagctggtttggagttcaaccctcggctccgccgccggctccttgcgccttcggagtgtcccgcagcgacgccgggagccgacgcgccgcgcgggtacctagccatggctggggcgagcaggctgctctttctgtggctgggctgcttctgcgtgagcctggcgcagggagagagaccgaagccacctttcccggagctccgcaaagctgtgccaggtgaccgcacggcaggtggtggcccggactccgagctgcagccgcaagacaaggtctctgaacacatgctgcggctctatgacaggtacagcacggtccaggcggcccggacaccgggctccctggagggaggctcgcagccctggcgccctcggctcctgcgcgaaggcaacacggttcgcagctttcgggcggcagcagcagaaactcttgaaagaaaaggactgtatatcttcaatctgacatcgctaaccaagtctgaaaacattttgtctgccacactgtatttctgtattggagagctaggaaacatcagcctgagttgtccagtgtctggaggatgctcccatcatgctcagaggaaacacattcagattgatctttctgcatggaccctcaaattcagcagaaaccaaagtcaactccttggccatctgtcagtggatatggccaaatctcatcgagatattatgtcctggctgtctaaagatatcactcaattcttgaggaaggccaaagaaaatgaagagttcctcataggatttaacattacgtccaagggacgccagctgccaaagaggaggttaccttttccagagccttatatcttggtatatgccaatgatgccgccatttctgagccagaaagtgtggtatcaagcttacagggacaccggaattttcccactggaactgttcccaaatgggatagccacatcagagctgccctttccattgagcggaggaagaagcgctctactggggtcttgctgcctctgcagaacaacgagcttcctggggcagaataccagtataaaaaggatgaggtgtgggaggagagaaagccttacaagacccttcaggctcaggcccctgaaaagagtaagaataaaaagaaacagagaaaggggcctcatcggaagagccagacgctccaatttgatgagcagaccctgaaaaaggcaaggagaaagcagtggattgaacctcggaattgcgccaggagatacctcaaggtagactttgcagatattggctggagtgaatggattatctcccccaagtcctttgatgcctattattgctctggagcatgccagttccccatgccaaagtctttgaagccatcaaatcatgctaccatccagagtatagtgagagctgtgggggtcgttcctgggattcctgagccttgctgtgtaccagaaaagatgtcctcactcagtattttattctttgatgaaaataagaatgtagtgcttaaagtataccctaacatgacagtagagtcttgcgcttgcagataacctggcaaagaactcatttgaatgcttaattcaat

SEQ ID NO: 421 - DNA, 5826 bp, Homo sapiens
cccgctctgcttcagcgcacgctgaagacggcactaggacccagggaagtccccgagcggggttcgcggaaaggcagccagactcctccttatctccagtgtcaaacttgacatcagcctgcgagcggagcatggtaacttctccagcaatcagagcgctccccctcacatcagtggcatgcttcatggagatatgctcctctcactgccctctgcaccagcaacatggattgtcagctctccatcctcctccttctcagctgctctgttctcgacagcttcggggaactgattccgcagccttccaatgaagtcaatctactggattcaaaaacaattcaaggggagctgggctggatctcttatccatcacatgggtgggaagagatcagtggtgtggatgaacattacacacccatcaggacttaccaggtgtgcaatgtcatggaccacagtcaaaacaattggctgagaacaaactgggtccccaggaactcagctcagaagatttatgtggagctcaagttcactctacgagactgcaatagcattccattggttttaggaacttgcaaggagacattcaacctgtactacatggagtctgatgatgatcatggggtgaaatttcgagagcatcagtttacaaagattgacaccattgcagctgatgaaagtttcactcaaatggatcttggggaccgtattctgaagctcaacactgagattagagaagtaggtcctgtcaacaagaagggattttatttggcatttcaagatgttggtgcttgtgttgccttggtgtctgtgagagtatacttcaaaaagtgcccatttacagtgaagaatctggctatgtttccagacacggtacccatggactcccagtccctggtggaggttagagggtcttgtgtcaacaattctaaggaggaagatcctccaaggatgtactgcagtacagaaggcgaatggcttgtacccattggcaagtgttcctgcaatgctggctatgaagaaagaggttttatgtgccaagcttgtcgaccaggtttctacaaggcattggatggtaatatgaagtgtgctaagtgcccgcctcacagttctactcaggaagatggttcaatgaactgcaggtgtgagaataattacttccgggcagacaaagaccctccatccatggcttgtacccgacctccatcttcaccaagaaatgttatctctaatataaacgagacctcagttatcctggactggagttggcccctggacacaggaggccggaaagatgttaccttcaacatcatatgtaaaaaatgtgggtggaatataaaacagtgtgagccatgcagcccaaatgtccgcttcctccctcgacagtttggactcaccaacaccacggtgacagtgacagaccttctggcacatactaactacacctttgagattgatgccgttaatggggtgtcagagctgagctccccaccaagacagtttgctgcggtcagcatcacaactaatcaggctgctccatcacctgtcctgacgattaagaaagatcggacctccagaaatagcatctctttgtcctggcaagaacctgaacatcctaatgggatcatattggactacgaggtcaaatactatgaaaagcaggaacaagaaacaagttataccattctgagggcaagaggcacaaatgttaccatcagtagcctcaagcctgacactatatacgtattccaaatccgagcccgaacagccgctggatatgggacgaacagccgcaagtttgagtttgaaactagtccagactctttctccatctctggtgaaagtagccaagtggtcatgatcgccatttcagcggcagtagcaattattctcctcactgttgtcatctatgttttgattgggaggttctgtggctataagtcaaaacatggggcagatgaaaaaagacttcattttggcaatgggcatttaaaacttccaggtctcaggacttatgttgacccacatacatatgaagaccctacccaagctgttcatgagtttgccaaggaattggatgccaccaacatatccattgataaagttgttggagcaggtgaatttggagaggtgtgcagtggtcgcttaaaacttccttcaaaaaaagagatttcagtggccattaagaccctgaaagttggctacacagaaaagcagaggagagacttcctgggagaagcaagcattatgggacagtttgaccaccccaatatcattcgactggaaggagttgttaccaaaagtaagccagttatgattgtcacagaatacatggagaatggttccttggatagtttcctacgtaaacacgatgcccagtttactgtcattcagctagtggggatgcttcgagggatagcatctggcatgaagtacctgtcagacatgggctatgttcaccgagacctcgctgctcggaacatcttgatcaacagtaacttggtgtgtaaggtttctgatttcggactttcgcgtgtcctggaggatgacccagaagctgcttatacaacaagaggagggaagatcccaatcaggtggacatcaccagaagctatagcctaccgcaagttcacgtcagccagcgatgtatggagttatgggattgttctctgggaggtgatgtcttatggagagagaccatactgggagatgtccaatcaggatgtaattaaagctgtagatgagggctatcgactgccaccccccatggactgcccagctgccttgtatcagctgatgctggactgctggcagaaagacaggaacaacagacccaagtttgagcagattgttagtattctggacaagcttatccggaatcccggcagcctgaagatcatcaccagtgcagccgcaaggccatcaaaccttcttctggaccaaagcaatgtggatatcactaccttccgcacaacaggtgactggcttaatggtgtctggacagcacactgcaaggaaatcttcacgggtgtggagtacagttcttgtgacacaatagccaagatttccacagatgacatgaaaaaggttggtgtcaccgtggttgggccacagaagaagatcatcagtagcattaaagctctagaaacgcaatcaaagaatggcccagttcccgtgtaaagcacgggacggaagtgcttctggacggaagtggtggctgtggaaggcgtagcatcatcctgcagacagacaataattctggagatactggtggaagttccaagtccaataagacactcaaatatgagtacaaatgccttaaaatggaattgaaaaactctttattttcccctatcatttattggatgggtgggtggggtatttttttgtaattgcttttttaaatattagttaatggattaaatttaattcttcagcgtaaaatggtgaagaactagcatatagccattgatcataaactgactatcataaaatcaaaacaagtgaaataacaaaatggacatggtggctttgtttaggtagagccacaaaagaaaagacttgtaatatttttatatacagaggaaatctgtaacaggtattttgtttcttttaaagcaagcaacacagaggaatttatacctcaaactatctggccatatttactaccttatcactgcattattctcttttatctgtttaaagcatatagagatgaagtttgtagttgttttaagtactacacatttttaaattgttagcttccttaagtatatcatgtaaagaaatgtcttaatttttgaaaaaagtacatatttattttcttttgaattgtttttattgttttctatttatgccttgatgatttaatatggatttgttacagccaagtgccaaatgctctctcaaattgtcagcaatttaactagacacagataataatgggtttctttcagattttttgaaccatccacttacatatatttttaaaaaatgaaatccttttcctgttcatacactaaccaaatctctcaaatctgttatcccaatcattgttgcctctccgtttattataaactgtatgctcacaacttagtgtaatataccagcttgtatgcaatggattttcaaccagataacatacctttcctgctctggtgcttagagactatcaactccctcctttagtgaaggagccgtgttagagcttccgagaatagctccactggagagaagtggaatcctatatagaatgctgcactaattgacaacacagcctataggccaatgcatgagtaaaaaaaaaaacaattactggctcactggctttgaaaagtcacttactattgttgctgaaacttgctgagctgtttatagagaatgatgataacagaacttttcctctgtatcactggtgtttaggtgaattaattaaacattgtgatcattagtaccaggtattattatctttaagagtcttccacttcaatgcacatggtgcagttttggtgtgtaacttagaaggattgaacttctttgaatttactggacataacattttcagaatagttggtcatctagcaaccgcctcaaaatgtgtaagcaggagagaaatttctcatcacagggatttagacttactattacataaaggctaactatgagcttgctcattaattttgaaaagatgtacctggtggatatctagctagtaatatattctgaagcaacattttagctctattgatactctttctaatgctgatatgatcttgagtataagaaatgcatatgtcactagaatggataaaataatgctgcaaacttaatgttcttatgcaaaatggaacgctaatgaaacacagcttacaatcgcaaatcaaaactcacaagtgctcatctgttgtagatttagtgtaataagacttagattgtgctccttcggatatgattgtttctcaaatcttggcaatattccttagtcaaatcaggctactagaattctgtattggatatataagagcatgaaatttttaaaaatacacttgtgattataaaattaatcacaaatttcacttatacctgctatcagcagctagaaaacattttttttttaaatcaagtattttgtgtttggaatgttagaatgagatctgaatgtggtttcaatctaattttttcccagactactattttcttttttaggtactattctgagcatactcaacaaaacccatgcatttcataaactaatagaagttgaggattgttgaatctatttcacttattttggctgtggtttccatctgaaagtagaggttgtatacaccatatactgttcttcattttattaatatttttctccttgacctctcataaatttactttacacaattcttaccctgtacatatgtaaacataagtgtacgattcttaaccatggagtagaggtactagaatgcttacggccatctctttgtacaggaactgcattgactttcagtaaacataaagccacaactcctacatgatgttatgtaccatatgatctgttttgtatcttaaatttgatttacatatattatttatttctggtaactcactcagtttatgctgtgctaaatatcaatcaagccatgtataaatgtgatatgattggcaatatgtgtttactttaaacttgtcttttcaaaatattactcagtttatgttgtacaatgtagatggcctcttactaatgtaaaatgatttgtagtggaaacatttatatttttataataaacataatgaaaatattttttacagattggaaaaaaaaaaaaaaaaaaa

SEQ ID NO: 422 - DNA, 5325 bp, Homo sapiens
gtgaattatgattttccttagtcagaagcactcatttttacccatgtagaccatccttaggaattaaatattggttatttaatgtagattataatgggaagctgatttttttcacaatggcatatttcaaggacttggttccaaactgagctgaagcttcccaatgcgttttgtacagtctgggaaaaactgtgctgcactggcccacttttgaaggccatcatgctctgtaatataaggatatcatcttattgctgatatctttggagagtccctagcagacacagaaaatgaatggaggcaaagagtgtgacggaggggacaaggaaggaggtcttccagctatacaagttcctgtgggttggcagcgtcgtgtggatcaaaatggagtgctttatgtcagtcccagtgggtctttgttatcttgcttggagcaggttaaaacatacctgcttactgatggaacatgcaagtgtggcttggaatgtcctcttattcttcccaaggtatttaattttgatcctggagctgctgtgaaacagagaaccgcagaagatgttaaggcagatgaagatgtcacaaagctatgcatacataaaagaaaaattattgcagtggccacacttcataaaagcatggaagccccacatccttctctggtgctcaccagtcccggaggaggaacaaatgcaactccagtagtaccttctcgggcagcaactccaagatcagtaagaaataagtctcatgaaggaattacaaattctgtaatgcctgaatgtaagaatcctttcaagttaatgattggatcatcaaatgccatgggaaggctatatgtacaagaactgcctggaagccaacaacaagaactccaccctgtctacccccgacagagattgggcagcagtgaacatggacagaaatctccattccgtggcagccatggaggcctgcccagcccagcgtcatcaggttcccagatatatggagatggttcaatctctccaaggactgacccacttggaagtcctgatgttttcacaagaagtaatcctggttttcatggagctcccaattctagtcctattcacctgaataggactcctctttctccaccttcagtaatgctacatggttctcctgtacagtcatcctgtgcaatggctggaaggactaatatacctctttccccaaccttgactacaaagagtccagtaatgaaaaaaccaatgtgtaatttttcaactaatatggaaataccacgagcaatgttccaccacaaaccaccccaaggcccacctccccctcctccaccttcttgtgctcttcagaaaaagccattaacatctgagaaagatccacttggcattcttgaccctattcctagtaaaccagtgaatcagaaccctgttatcattaatccaaccagtttccattcaaatgtccactctcaggtacctatgatgaatgtaagcatgcctcctgctgttgttcctttgccaagtaatctcccattgccaactgtaaaacctggtcacatgaatcatgggagtcatgtacaaagagttcagcattcagcttcaacctccctgtccccttctccagtgacatcccccgtgcacatgatggggactggaattggaaggattgaggcatcgccccaaagatcacgctcatcttccacatcatcagatcatggaaatttcatgatgccacctgtaggaccccaggccacttctagtggtattaaggttccacccaggtcaccaaggtcaacaatagggtccccaaggccatcaatgccatcaagcccttctaccaagtccgatggacatcatcagtacaaggatatccctaacccattaattgctggaataagtaatgtactaaataccccaagcagtgcagcttttcctactgcatctgccggaagtagttctgtaaagagtcagcctggtttgctgggaatgcctttaaatcagatcttgaaccagcacaatgctgcctcctttccagcaagtagtttactctcagcagcagccaaagcacagctagcaaatcaaaacaaacttgctggtaacaacagtagcagcagtagcaattctggagctgttgccggcagtggcaacactgaaggacatagcactttaaacaccatgttccctcctactgccaacatgcttctcccaacaggtgaagggcaaagtggtcgagcagcactaagagataagctgatgtctcagcaaaaagacgcattgcggaaaagaaaacaaccacctacgacagtgttgagtttgctcagacagtctcaaatggatagttctgcagttcctaaacctggacctgacttgctaaggaagcagggtcagggttcatttcccatcagttcaatgtctcagttactacagtctatgagttgtcaaagctctcacttgagtagcaatagtaccccgggttgtggggcctcaaatactgctttgccttgctctgctaaccagctgcattttacagatcccagtatgaactctagtgttcttcagaacatacctttaagaggggaagccgtgcactgccacaatgcaaacactaactttgttcacagtaacagtccagtccccaaccaccatcttgcaggtttaataaatcagattcaggctagcgggaactgtgggatgctcagtcagtcgggcatggctttaggaaattccttacatcccaatccacctcagtcaagaatttcaacgtcctccactccagtgataccaaacagcattgttagcagctataatcaaacaagttctgaagcaggcggttcaggaccatcatcctccatagccatagcgggcaccaaccaccctgccatcacaaagacaacatctgttcttcaagatggcgtcatagtcaccactgcagctggaaacccactgcagagtcagctacccattgggagtgattttccttttgttggccaggagcacgcacttcattttccatccaacagcacttcaaacaaccatcttccacaccccttgaaccccagcctcctcagttctctacctatctctttgccagtgaatcaacagcatctcctaaaccagaatctattaaatatcctccagccttcagcaggagaaggtgatatgtcatcaataaacaatactttgagtaaccatcaactgactcatctacagtcgctgttaaacaacaatcagatgtttcctccaaatcagcaacagcagcaacttctccaggggtaccagaatctccaggcgttccaaggacagtccacaattccttgcccagctaacaataaccccatggcttgtctgtttcagaactttcaggtgagaatgcaggaagatgcagctctcctaaacaaaagaataagcactcagcctgggctcacagcacttcctgagaatccaaacactacacttccaccttttcaagatacaccttgtgagttgcaaccgaggattgacccatctcttggtcaacaggtgaaggatggcctcgttgtgggtggcccaggtgatgcttccgtagatgccatttacaaagcagttgtcgatgcagccagcaaaggaatgcaggttgtcatcaccactgcagtcaacagtacaactcagatcagccccattccagctctgagtgccatgagtgccttcactgcctcaattggtgacccattaaatctctccagtgctgtcagtgcggtcattcatggacggaacatgggaggtgttgatcatgatggtaggctgaggaattcaagaggggctcggctgcccaagaatctagaccatgggaaaaatgtgaacgaaggagatgggtttgaatatttcaagtcagcaagttgccacacatccaaaaaacagtgggacggggagcaaagccccagaggggagcgaaacaggtggaagtacgaggaatttttagatcatccaggccatatccacagtagtccttgtcatgaaaggcccaacaatgtctctacactgccatttctgcctggggaacagcacccaatactgttaccaccaagaaactgtccaggggataaaattctagaggaaaatttcaggtataataactacaaaagaactatgatgagttttaaggagagactagagaacactgtggaaagatgtgcacacataaatgggaatagacctcgacagagtcggggatttggagagctgctaagcactgcaaagcaagacctggtcctagaggagcagtctccaagttcctcaaatagtttggaaaattctctggtcaaagactacatccattacaatggagactttaatgccaaaagcgttaatgggtgtgtgcctagcccttcagatgctaaaagcattagtagtgaagatgacctaaggaacccagactccccctcttcaaatgaattgatacattatagaccaaggacgttcaatgttggcgacttggtctggggccaaatcaaaggactgacttcctggcctggaaaattagtaagagaagacgacgttcacaattcatgtcaacaaagccccgaggaagggaaggtggagcccgagaagttgaagacactaacagaaggtttggaagcctacagccgtgtccggaaaaggaacagaaaaagtggaaagctaaataaccatttagaagctgctattcatgaggccatgagtgaactggacaaaatgtctgggactgtacaccaaatcccacagggtgacagacaaatgagaccccccaaacccaagaggaggaagatctccagataacagagactactccactaatgcgcagtgtttattaaaggaacatgcacagatgtatctgtatataggtattgatatagccacagttatatcaatatttagactatggcagatagctaccaccaccacagggtgctaaaagaaacagtgatacaaaatttttttgatcaggaaggataatgaatgctggaaaagccaatcaaagtctctgtgtgatgagagtgatcaatggtcaagagattactgagaaactctttttctataatactaaattgtgattataagaaatagtccaaatgtttctgaagaattttcaatgttgtatatagaaaatacagaatttcatggtgatatcagaaatgtaaatattgtacagtattgtcatgtacaagcgtacctaatgcacactttatcttttattgtacaaagaaatagtgtacaaaattctttggtttctatggagtacacctaccagagactaccagtgtaaagtgataaataaaaatacaacctaaatgcttttctatgataatgtaaaaaaaaaaaaaaaaaa

SEQ ID NO: 423 - DNA, 2817 bp, Homo sapiens
atggctgcggcgatagccagctccttgatccggcagaagcggcaggcgagggagtccaacagcgaccgagtgtcggcctccaagcgccgctccagccccagcaaagacgggcgctccctgtgcgagaggcacgtcctcggggtgttcagcaaagtgcgcttctgcagcggccgcaagaggccggtgaggcggagaccagaaccccagctcaaagggattgtgacaaggttattcagccagcagggatacttcctgcagatgcacccagatggtaccattgatgggaccaaggacgaaaacagcgactacactctcttcaatctaattcccgtgggcctgcgtgtagtggccatccaaggagtgaaggctagcctctatgtggccatgaatggtgaaggctatctctacagttcagatgttttcactccagaatgcaaattcaaggaatctgtgtttgaaaactactatgtgatctattcttccacactgtaccgccagcaagaatcaggccgagcttggtttctgggactcaataaagaaggtcaaattatgaaggggaacagagtgaagaaaaccaagccctcatcacattttgtaccgaaacctattgaagtgtgtatgtacagagaaccatcgctacatgaaattggagaaaaacaagggcgttcaaggaaaagttctggaacaccaaccatgaatggaggcaaagttgtgaatcaagattcaacatagctgagaactctccccttcttccctctctcatcccttccccttcccttccttcccatttacccatttccttccagtaaatccacccaaggagaggaaaataaaatgacaacgcaagacctagtggctaagattctgcactcaaaatcttcctttgtgtaggacaagaaaattgaaccaaagcttgcttgttgcaatgtggtagaaaattcacgtgcacaaagattagcacacttaaaagcaaaggaaaaaataaatcagaactccataaatattaaactaaactgtattgttattagtagaaggctaattgtaatgaagacattaataaagatgaaataaacttattactttaaaggaaaggatttggagaattgaactcacaaactgatgttatatactcaatagcttaaactcatgataatgctgcgatgtgtggttttgcttgattttgtattttatttgggcatctggaattgacacaccattacattctgtttgcaggattttttttgtaaccatgaaattgaacatttccaaattataaactatgttaatacctataaaatatatagccaggaaccatttatcatcaagaaaagtgtaagaaattatttttgagatgtaatttaagattgttttatgtaaaaggaaaatcttgtatggcatcgaatagccttaatgaatttaattctttcacaaaaatgatttcaaattatcctagagtataacatttttatcaaagatattatttccggagttcttctttctttcttttttttttttttttagtaatttagcaaaaacattactgttctaatgctgaagtgacttttgccagtgccatgtccaggtggtgaggtataagttacttgctcttagcatttggtctgatttttttgctttgtggacacctttgagagtatccacaaagcaatgtctcaggtgtggacacctgagagcatgttttagaaagctttgtaccctgtcttgtggcaggaaagaaagaacaggggttttacataaggaaataagtcctaggaaattagtcaacgcaaattgcatttgcctttgtaccttaccacagtcttatattgttttttaaactctgccatgaaatttggagacatgactgtgaaattcctaacttactatcttacaaagccagtagctaatttgttgctctatgtatgatcctgttacaagtccagtttgcaattcatttgtttcctagaacacagaagggtaccagtaatacactaaatgttcaaggtgtgtagagaaataatatggaattagcagctatgactccaacagacaggattgtgtgagcagctgaaaggagcaaaaaagaactcagtgtaagagaaggcacatacatagttaagaatactaaagtatttttaaaaatcaaggaagaaataaatgttacacaatttgcattggaataaatagatctatttagtcctacaaatcaggagtggtgtagagacatccaaatttaaagaaaaaaaaacacaaaacagaatgttaaaaatgtatgcagatttatggatattatcaatgagaagacatagcatgtaacttctcctatatctctactgtccagcatgtattgttccaaatatgactccctaaaatatatacactttgcagaagctctaggccctcacctcaaaccttgccattggttgccgtatttcaaggtcaatatagtttccctcactttacacaatcattattcttcaatagtggaccatatccttcaccaggtatcctatttctgttatctagaggttagcagaaaatgaaatgaaggaatttccctaagcagttgggaagaacaaattgtatgcatgtaggcaaagattttgaagatacatttgcaagagatatttgtttaaccaaaatatttggaaagtaacaaataaagacatttaaattttctaaaaatggacttgctcttctaggaaaagaatacccctggggcaaaaatataactctagctgtatttcttcttgtcactcttgattcaacttgattataaatacacctgtcactaccagaaccaaaaaaaaaaaaaaaaaa

SEQ ID NO: 424 - DNA, 4204 bp, Homo sapiens
gaattccggccagagtcacacacggtcctaagagctgggcaccaggaagcgaaggctgatctgaagaagacacttgaatcatgggtgacgttaaaaattttctgtatgcctggtgtggcaaaaggaagatgaccccgacctatgaaattagagcagtggggaacaaaaacaggcagaaattcatgtgtgaggttcaggtggaaggttataattacactggcatggggaattccaccaataaaaaagatgcacaaagcaatgctgccagagactttgttaactatttggttcgaataaatgaaataaagagtgaagaagttccagcttttggggtagcatctccgcccccacttactgatactcctgacactacagcaaatgctgaaggagatttaccaacacaccatggaggacctcttctccacatcttggctctcaaagcagaaaataattctgaggtaggggcctctggctatggtgttcctgggcccacctgggaccgaggagccaacttgaaggattactactcaagaaaggaagaacaagaagtgcaagcgactctagaatcagaagaagtggatttaaatgctgggcttcatggaaactggaccttggaaaatgctaaagctcgtctaatccaatattttcagaaagaaaagatccaaggagaatataagtacacccaagtgggtcctgatcacaacaggagctttattgcagaaatgaccatttatatcaagcagctgggcagaaggatttttgcacgagaacatggatcaaataagaaattggcagcacagtcctgtgccctgtcacttgtcagacaactgtaccatcttggagtggttgaagcttacaccggacttacaaagaagaaggaaggagagacagtggagccttacaaagtaaacctctctcaagatttagagcatcagctgcaaaacatcattcaagagctaaatcttgagattttgcccccgcctgaagatccttctgtgccagttgcactcaacattggcaaattggctcagttcgaaccatctcagcgacaaaaccaagtgggtgtggttccttggtcacctccacaatccaactggaatccttggactagtagcaacattgatgaggggcctctggcttttgctactccagagcaaataagcatggacctcaagaatgaattgatgtaccagttggaacaggatcatgatttgcaagcaatcttgcaggagagagagttactgcctgtgaagaaatttgaaagtgagattctggaagcaatcagccaaaattcagttgtcattattagaggggctactggatgtgggaaaaccacacaggttccccagttcattctagatgactttatccagaatgaccgagcagcagagtgtaacatcgtagtaactcagcccagaagaatcagtgcggtttctgtggcagagcgagttgcatttgaaagaggagaagagcctggaaaaagctgtggatacagcgttcgatttgagtctgtacttcctcgtcctcatgccagtataatgttttgtactgtaggtgtgctcctgagaaaattagaagcaggcattcgaggaatcagtcatgtaattgtagatgaaatacatgaaagagatattaatactagcttccttctggtagtactgcgtgatgttgttcaggcttatcctgaagttcgcattgtttttatgtctgctactattgataccagcatgttttgtgaatatttcttcaattgcccatcattgaagttatggaggacttacccagttcaagaatattttctggaagactgcattcagatgacccactttgttcctccaccaaaagacaaaaagaagaaggataaggatgatgatggtggtgaggatgatgatgcaaattgcaacttgatctgtggtgatgaatatggtccagaaacaaggttgagcatgtctcaattgaacgaaaaggaaactccttttgaactcatcgaggctctacttaagtacattgaaacccttaatgttcctggagctgtgttggtttttttgcctggctggaatctgatttatactatgcagaagcatttggaaatgaatccacattttggaagccatcggtatcagattctacccctgcattctcagattcctcgagaggaacagcgcaaagtgtttgatccagtaccagttggagtaaccaaggttattttgtccacaaatattgctgaaacaagcattaccataaatgatgttgtttatgtcattgactcctgcaagcagaaagtgaaactcttcactgctcacaacaatatgaccaactattctaccgtatgggcatcaaaaacaaaccttgagcaacggaaagggcgagctggccggagtacggctggattctgctttcacctgtgcagccgagctcgttttgagagacttgaaacccacatgacaccagagatgttccgaacaccattgcatgaaattgctcttagcataaaacttctgcgtctaggaggaattggccaatttctggccaaagcaattgaacctccccctttggatgctgtgattgaagcagaacacactcttagagagcttgatgcattagatgccaatgatgagttgactcctttgggacgaatcctggctaaactccccattgagcctcgttttggcaaaatgatgataatggggtgtattttctacgtgggagatgctatctgtaccattgctgctgctacctgctttccagagcctttcgtcaatgaaggaaagcaactgggctatatccatcgaaattttgctggaaacagattttctgatcacgtagcccttttatcagtattccaagcctgggatgatgctagaatgggtggagaagaagcagagatacgtttttgtgagcacaaaagacttaatatggctacactaagaatgacctgggaagccaaagttcagctcaaagagattttgattaattctgggtttccagaagattgtttgttgacacaagtgtttactaacactggaccagataataatttggatgttgttatctccctcctggcctttggtgtgtaccccaatgtatgctatcataaggaaaagaggaagattctcaccactgaagggcgtaatgcacttatccacaaatcatctgttaattgtccttttagtagccaagacatgaattacccatctcccttctttgtatttggtgaaaagattcgaactcgagccatctctgctaaaggcatgactttagtaccccccctgcagttgcttctctttgcctccaagaaagtccaatctgatgggcagattgtgcttgtagatgactggattaaactgcaaatatctcatgaagctgctgcctgtatcactggtctccgggcagccatggaggctttggttgttgaagtaaccaaacaacctgctatcatcagccagttggaccccgtaaatgaacgtatgctgaacatgatccgtcagatctctgagccctcagctgctggtatcaaccttatgattggcagtacacggtatggagatggtccacgtcctcccaagatggcccgatacgacaatggaagcggatatagaaggggaggttctagttacagtggtggaggctatggcggtggatatagcagtggaggctatggtagcggaggctatggtggcagcgcaactccttcgggcaggatatgtgcaggtgttggtggaggctatagaggagtttcccgaggtggctttagaggcaactctggaggagactacagagggcctagtggaggctacagaggatctgggggattccagcgaggaggtggtaggggggcctatggaactggctacttggacattgaagaggaggtggcggctataaaacttggttatgtcagttctgtgtgtagacagtaaggaaaaaaaggcatgctatgtgttacgtgttttttccagtatgtttatttgccaccaaaaagtaaatgcattttcacccattctgtggttcattgtagtttaaggaaaccaagcatatagatgcattagtgattttgtttattttatgtaaaatataacgatcttcttttaaaaataccacagtttgtatttttctttaaggagtaaagatttgcctttaaataacttggtattttcctggctttcgtttaatacaatagaaaataaagtattacacggaattc

SEQ ID NO: 425 - DNA, 1009 bp, Homo sapiens
gacaaatgagggtttggcatgcagctcgtcatcttaagagttactatcttcttgccctggtgtttcgccgttccagtgccccctgctgcagaccataaaggatgggactttgttgagggctatttccatcaatttttcctgaccgagaaggagtcgccactccttacccaggagacacaaacacagctcctgcaacaattccatcggaatgggacagacctacttgacatgcagatgcatgctctgctacaccagccccactgtggggtgcctgatgggtccgacacctccatctcgccaggaagatgcaagtggaataagcacactctaacttacaggattatcaattacccacatgatatgaagccatccgcagtgaaagacagtatatataatgcagtttccatctggagcaatgtgacccctttgatattccagcaagtgcagaatggagatgcagacatcaaggtttctttctggcagtgggcccatgaagatggttggccctttgatgggccaggtggtatcttaggccatgcctttttaccaaattctggaaatcctggagttgtccattttgacaagaatgaacactggtcagcttcagacactggatataatctgttcctggttgcaactcatgagattgggcattctttgggcctgcagcactctgggaatcagagctccataatgtaccccacttactggtatcacgaccctagaaccttccagctcagtgccgatgatatccaaaggatccagcatttgtatggagaaaaatgttcatctgacataccttaatgttagcacagaggacttattcaacctgtcctttcagggagtttattggaggatcaaagaactgaaagcactagagcagccttggggactgctaggatgaagccctaaagaatgcaacctagtcaggttagctgaaccgacactcaaaacgctactgagtcacaataaagattgttttaaagagtaaaaaaaaaaaaaaaaaaaa

SEQ ID NO: 426 - DNA, 2534 bp, Homo sapiens
ggacagtggagacgcgccttctcggctctggtccgcgccctggggccctggctccctggaggggctggggaactggaagctgggccgagagagttcccgctgcagctatcgcgcagtccctcctgcgcccgggcgcccccagcgggttccgggaggcgcccggtgagcccacgtctgttgcggcggagcgagcgcgctccgggagggccgagagccggcggggctggcaggagctctcgggcgcccgcctccctccttcgcggacggtctcccgacacgccggctgagagcccttttcgactgtgagctgcggcagctgagcagaggcggcggcgcgggacctgcagtcgccagggattccctccaggtgacgatgctctggttctccggcgtcggggctctggctgagcgttactgccgccgctcgcctgggattacgtgctgcgtcttgctgctactcaattgctcgggggtccccatgtctctggcttcctccttcttgacaggttctgttgcaaaatgtgaaaatgaaggtgaagtcctccagattccatttatcacagacaacccttgcataatgtgtgtctgcttgaacaaggaagtgacatgtaagagagagaagtgccccgtgctgtcccgagactgtgccctggccatcaagcagaggggagcctgttgtgaacagtgcaaaggttgcacctatgaaggaaatacctataacagctccttcaaatggcagagcccggctgagccttgtgttctacgccagtgccaggagggcgttgtcacagagtctggggtgcgctgtgttgttcattgtaaaaaccctttggagcatctgggaatgtgctgccccacatgtccaggctgtgtgtttgagggtgtgcagtatcaagaaggggaggaatttcagccagaaggaagcaaatgtaccaagtgttcctgcactggaggcaggacacaatgtgtgagagaagtctgtcccattctctcctgtccccagcaccttagtcacatacccccaggacagtgctgccccaaatgtttgggtcagaggaaagtgtttgacctcccttttgggagctgcctctttcgaagtgatgtttatgacaatggatcctcatttctgtacgataactgcacagcttgtacctgcagggactctactgtggtttgcaagaggaagtgctcccaccctggtggctgtgaccaaggccaggagggctgttgtgaagagtgcctcctacgagtgcccccagaagacatcaaagtatgcaaatttggcaacaagattttccaggatggagagatgtggtcctctatcaattgtaccatctgtgcttgtgtgaaaggcaggacggagtgtcgcaataagcagtgcattcccatcagtagctgcccacagggcaaaattctcaacagaaaaggatgctgtcctatttgcactgaaaagcccggcgtttgcacggtgtttggagatccccactacaacacttttgacggtcggacatttaactttcaggggacgtgtcagtacgttttgacaaaagactgctcctcccctgcctcgcccttccaggtgctggtgaagaacgacgcccgccggacacgctccttctcgtggaccaagtcggtggagctggtgctgggcgagagcagggtcagcctgcagcagcacctcaccgtgcgctggaacggctcgcgcatcgcgctcccctgccgcgcgccacacttccacatcgacctggatggctacctcttgaaagtgaccaccaaagcaggtttggaaatatcttgggatggagacagttttgtagaagtcatggctgcgccgcatctcaagggcaagctctgtggtctttgtggcaactacaatggacataaacgtgatgacttaattggtggagatggaaacttcaagtttgatgtggatgactttgctgaatcttggagggtggagtccaatgagttctgcaacagacctcagagaaagccagtgcctgaactgtgtcaagggacagtcaaggtaaagctccgggcccatcgagaatgccaaaagctcaaatcctgggagtttcagacctgccactcgactgtggactacgccactttctaccggtcctgtgtgacagacatgtgtgaatgtccagtccataaaaactgttattgcgagtcatttttggcatatacccgggcctgccagagagagggcatcaaagtccactgggagcctcagcagaattgtgcagccacccagtgtaagcatggtgctgtgtacgatacctgtggtccgggatgtatcaagacctgtgacaactggaatgaaattggtccatgcaacaagccgtgcgttgctgggtgccactgtccagcaaacttggtccttcacaagggaaggtgcatcaagccagtcctttgtccccagcggtgacctttgtttcgatccttaagactctgaaatctggtgactttgacactgaagcggaagagccaatgaagggctgcagtatttgtgtgcccgattctgtaaacac

SEQ ID NO: 427 - DNA, 4098 bp, Homo sapiens
gacggtcggctgacaggctccacagagctccactcacgctcaggccctggacggacaggcagtccaacggaacagaaacatccctcagccccacaggcacgatctgttcctcctgggaagatgcagaggctcatgatgctcctcgccacatcgggcgcctgcctgggcctgctggcagtggcagcagtggcagcagcaggtgctaaccctgcccaacgggacacccacagcctgctgcccacccaccggcgccaaaagagagattggatttggaaccagatgcacattgatgaagagaaaaacacctcacttccccatcatgtaggcaagatcaagtcaagcgtgagtcgcaagaatgccaagtacctgctcaaaggagaatatgtgggcaaggtcttccgggtcgatgcagagacaggagacgtgttcgccattgagaggctggaccgggagaatatctcagagtaccacctcactgctgtcattgtggacaaggacactggtgaaaacctggagactccttccagcttcaccatcaaagttcatgacgtgaacgacaactggcctgtgttcacgcatcggttgttcaatgcgtccgtgcctgagtcgtcggctgtggggacctcagtcatctctgtgacagcagtggatgcagacgaccccactgtgggagaccacgcctctgtcatgtaccaaatcctgaaggggaaagagtattttgccatcgataattctggacgtattatcacaataacgaaaagcttggaccgagagaagcaggccaggtatgagatcgtggtggaagcgcgagatgcccagggcctccggggggactcgggcacggccaccgtgctggtcactctgcaagacatcaatgacaacttccccttcttcacccagaccaagtacacatttgtcgtgcctgaagacacccgtgtgggcacctctgtgggctctctgtttgttgaggacccagatgagccccagaaccggatgaccaagtacagcatcttgcggggcgactaccaggacgctttcaccattgagacaaaccccgcccacaacgagggcatcatcaagcccatgaagcctctggattatgaatacatccagcaatacagcttcatcgtcgaggccacagaccccaccatcgacctccgatacatgagccctcccgcgggaaacagagcccaggtcattatcaacatcacagatgtggacgagccccccattttccagcagcctttctaccacttccagctgaaggaaaaccagaagaagcctctgattggcacagtgctggccatggaccctgatgcggctaggcatagcattggatactccatccgcaggaccagtgacaagggccagttcttccgagtcacaaaaaagggggacatttacaatgagaaagaactggacagagaagtctacccctggtataacctgactgtggaggccaaagaactggattccactggaacccccacaggaaaagaatccattgtgcaagtccacattgaagttttggatgagaatgacaatgccccggagtttgccaagccctaccagcccaaagtgtgtgagaacgctgtccatggccagctggtcctgcagatctccgcaatagacaaggacataacaccacgaaacgtgaagttcaaattcaccttgaatactgagaacaactttaccctcacggataatcacgataacacggccaacatcacagtcaagtatgggcagtttgaccgggagcataccaaggtccacttcctacccgtggtcatctcagacaatgggatgccaagtcgcacgggcaccagcacgctgaccgtggccgtgtgcaagtgcaacgagcagggcgagttcaccttctgcgaggatatggccgcccaggtgggcgtgagcatccaggcagtggtagccatcttactctgcatcctcaccatcacagtgatcaccctgctcatcttcctgcggcggcggctccggaagcaggcccgcgcgcacggcaagagcgtgccggagatccacgagcagctggtcacctacgacgaggagggcggcggcgagatggacaccaccagctacgatgtgtcggtgctcaactcggtgcgccgcggcggggccaagcccccgcggcccgcgctggacgcccggccttccctctatgcgcaggtgcagaagccaccgaggcacgcgcctggggcacacggagggcccggggagatggcagccatgatcgaggtgaagaaggacgaggcggaccacgacggcgacggccccccctacgacacgctgcacatctacggctacgagggctccgagtccatagccgagtccctcagctccctgggcaccgactcatccgactctgacgtggattacgacttccttaacgactggggacccaggtttaagatgctggctgagctgtacggctcggacccccgggaggagctgctgtattaggcggccgaggtcactctgggcctggggacccaaaccccctgcagcccaggccagtcagacgccaggcaccacagcctccaaaaatggcagtgactccccagcccagcaccccttcctcgtgggtcccagagacctcatcagccttgggatagcaaactccaggttcctgaaatatccaggaatatatgtcagtgatgactattctcaaatgctggcaaatccaggctggtgttctgtctgggctcagacatccacataaccctgtcacccacagaccgccgtctaactcaaagacttcctctggctccccaaggctgcaaagcaaaacagactgtgtttaactgctgcagggtctttttctagggtccctgaacgccctggtaaggctggtgaggtcctggtgcctatctgcctggaggcaaaggcctggacagcttgacttgtggggcaggattctctgcagcccattcccaagggagactgaccatcatgccctctctcgggagccctagccctgctccaactccatactccactccaagtgccccaccactccccaacccctctccaggcctgtcaagagggaggaaggggccccatggcagctcctgaccttgggtcctgaagtgacctcactggcctgccatgccagtaactgtgctgtactgagcactgaaccacattcagggaaatggcttattaaactttgaagcaactgtgaattcattctggaggggcagtggagatcaggagtgacagatcacagggtgagggccacctccacacccaccccctctggagaaggcctggaagagctgagaccttgctttgagactcctcagcacccctccagttttgcctgagaaggggcagatgttcccggagcagaagacgtctccccttctctgcctcacctggtcgccaatccatgctctctttcttttctctgtctactccttatcccttggtttagaggaacccaagatgtggcctttagcaaaactggacaatgtccaaacccactcatgactgcatgacggagccgagccatgtgtctttacacctcgctgttgtcacatctcagggaactgaccctcaggcacaccttgcagaaggcaaggccctgccctgcccaacctctgtggtcacccatgcatcttccactggaacgtttcactgcaaacacaccttggagaagtggcatcagtcaacagagaggggcagggaaggagacaccaagctcacccttcgtcatggaccgaggttcccactctgggcaaagcccctcacactgcaagggattgtagataacactgacttgtttgttttaaccaataactagcttcttataatgatttttttactaatgatacttacaagtttctagctctcacagacatatagaataagggtttttgcataataagcaggttgttatttaggttaacaatattaattcaggttttttagttggaaaaacaattcctgtaaccttctattttctataattgtagtaattgctctacagataatgtctatatattggccaaactggtgcatgacaagtactgtatttttttatacctaaataaagaaaaatctttagcctgggcaacaaaaaaa

SEQ ID NO: 428 - DNA, 1383 bp, Homo sapiens
ctagtttctaaggatcatgtctgcgagccaggattcccgatccagagacaatggccccgatgggatggagcccgaaggcgtcatcgagagtaactggaatgagattgttgacagctttgatgacatgaacctctcggagtcccttctccgtggcatctacgcctatggttttgagaagccctctgccatccagcagcgagccattctaccttgtatcaagggttatgatgtgattgctcaagcccaatctgggactgggaaaacggccacatttgccatatcgattctgcagcagattgaattagatctaaaagccacccaggccttggtcctagcacccactcgagaattggctcagcagatacagaaggtggtcatggcactaggagactacatgggcgcctcctgtcacgcctgtatcgggggcaccaacgtgcgtgctgaggtgcagaaactgcagatggaagctccccacatcatcgtgggtacccctggccgtgtgtttgatatgcttaaccggagatacctgtcccccaaatacatcaagatgtttgtactggatgaagctgacgaaatgttaagccgtggattcaaggaccagatctatgacatattccaaaagctcaacagcaacacccaggtagttttgctgtcagccacaatgccttctgatgtgcttgaggtgaccaagaagttcatgagggaccccattcggattcttgtcaagaaggaagagttgaccctggagggtatccgccagttctacatcaacgtggaacgagaggagtggaagctggacacactatgtgacttgtatgaaaccctgaccatcacccaggcagtcatcttcatcaacacccggaggaaggtggactggctcaccgagaagatgcatgctcgagatttcactgtatccgccatgcatggagatatggaccaaaaggaacgagacgtgattatgagggagtttcgttctggctctagcagagttttgattaccactgacctgctggccagaggcattgatgtgcagcaggtttctttagtcatcaactatgaccttcccaccaacagggaaaactatatccacagaatcggtcgaggtggacggtttggccgtaaaggtgtggctattaacatggtgacagaagaagacaagaggactcttcgagacattgagaccttctacaacacctccattgaggaaatgcccctcaatgttgctgacctcatctgaggggctgtcctgccacccagccccagccagggctcaatctctgggggctgaggagcagcaggaggggggagggaagggagccaagggatggacatcttgtcattttttttctttgaataaatgtcactttttgaggcaaaagaagg

SEQ ID NO: 429 - DNA, 1306 bp, Homo sapiens
cacagccccccgcccccatggccgcccgtcggagccagaggcggagggggcgccggggggagccgggcaccgccctgctggtcccgctcgcgctgggcctgggcctggcgctggcctgcctcggcctcctgctggccgtggtcagtttggggagccgggcatcgctgtccgcccaggagcctgcccaggaggagctggtggcagaggaggaccaggacccgtcggaactgaatccccagacagaagaaagccaggatcctgcgcctttcctgaaccgactagttcggcctcgcagaagtgcacctaaaggccggaaaacacgggctcgaagagcgatcgcagcccattatgaagttcatccacgacctggacaggacggagcgcaggcaggtgtggacgggacagtgagtggctgggaggaagccagaatcaacagctccagccctctgcgctacaaccgccagatcggggagtttatagtcacccgggctgggctctactacctgtactgtcaggtgcactttgatgaggggaaggctgtctacctgaagctggacttgctggtggatggtgtgctggccctgcgctgcctggaggaattctcagccactgcggccagttccctcgggccccagctccgcctctgccaggtgtctgggctgttggccctgcggccagggtcctccctgcggatccgcaccctcccctgggcccatctcaaggctgcccccttcctcacctacttcggactcttccaggttcactgaggggccctggtctccccacagtcgtcccaggctgccggctcccctcgacagctctctgggcacccggtcccctctgccccaccctcagccgctctttgctccagacctgcccctccctctagaggctgcctgggcctgttcacgtgttttccatcccacataaatacagtattcccactcttatcttacaactcccccaccgcccactctccacctcactagctccccaatccctgaccctttgaggcccccagtgatctcgactcccccctggccacagacccccagggcattgtgttcactgtactctgtgggcaaggatgggtccagaagaccccacttcaggcactaagaggggctggacctggcggcaggaagccaaagagactgggcctaggccaggagttcccaaatgtgaggggcgagaaacaagacaagctcctcccttgagaattccctgtggatttttaaaacagatattatttttattattattgtgacaaaatgttgataaatggatattaaatagaataagtcag

SEQ ID NO: 430 - DNA, 3421 bp, Homo sapiens
gtcaccatggccgaggcgcctcaggtggtggagatcgacccggacttcgagccgctgccccggccgcgctcgtgcacctggccgctgcccaggccggagtttagccagtccaactcggccacctccagcccggcgccgtcgggcagcgcggctgccaaccccgacgccgcggcgggcctgccctcggcctcggctgccgctgtcagcgccgacttcatgagcaacctgagcttgctggaggagagcgaggacttcccgcaggcgcccggctccgtggcggcggcggtggcggcggcggccgccgcggccgccaccggggggctgtgcggggacttccagggcccggaggcgggctgcctgcacccagcgccaccgcagcccccgccgcccgggcccgtgtcgcagcacccgccggtgccccccgccgccgctgggccgctcgcggggcagccgcgcaagagcagctcgtcccgccgcaacgcgtggggcaacctgtcctacgccgacctcatcaccaaggccatcgagagctcggcggagaagcggctcacgctgtcgcagatctacgagtggatggtcaagagcgtgccctacttcaaggataagggtgacagcaacagctcggcgggctggaagaattcaattcgtcataatctgtccctacacagcaagttcattcgtgtgcagaatgaaggaactggaaaaagttcttggtggatgctcaatccagagggtggcaagagcgggaaatctcctaggagaagagctgcatccatggacaacaacagtaaatttgctaagagccgaagccgagctgccaagaagaaagcatctctccagtctggccaggagggtgctggggacagccctggatcacagttttccaaatggcctgcaagccctggctctcacagcaatgatgactttgataactggagtacatttcgccctcgaactagctcaaatgctagtactattagtgggagactctcacccattatgaccgaacaggatgatcttggagaaggggatgtgcattctatggtgtacccgccatctgccgcaaagatggcctctactttacccagtctgtctgagataagcaatcccgaaaacatggaaaatcttttggataatctcaaccttctctcatcaccaacatcattaactgtttcgacccagtcctcacctggcaccatgatgcagcagacgccgtgctactcgtttgcgccaccaaacaccagtttgaattcacccagcccaaactaccaaaaatatacatatggccaatccagcatgagccctttgccccagatgcctatacaaacacttcaggacaataagtcgagttatggaggtatgagtcagtataactgtgcgcctggactcttgaaggagttgctgacttctgactctcctccccataatgacattatgacaccagttgatcctggggtagcccagcccaacagccgggttctgggccagaacgtcatgatgggccctaattcggtcatgtcaacctatggcagccaggcatctcataacaaaatgatgaatcccagctcccatacccaccctggacatgctcagcagacatctgcagtcaacgggcgtcccctgccccacacggtaagcaccatgccccacacctcgggtatgaaccgcctgacccaagtgaagacacctgtacaagtgcctctgccccaccccatgcagatgagtgccctggggggctactcctccgtgagcagctgcaatggctatggcagaatgggccttctccaccaggagaagctcccaagtgacttggatggcatgttcattgagcgcttagactgtgacatggaatccatcattcggaatgacctcatggatggagatacattggattttaactttgacaatgtgttgcccaaccaaagcttcccacacagtgtcaagacaacgacacatagctgggtgtcaggctgagggttagtgagcaggttacacttaaaagtacttcagattgtctgacagcaggaactgagagaagcagtccaaagatgtctttcaccaactcccttttagttttcttggttaaaaaaaaaaacaaaaaaaaaaaccctccttttttcctttcgtcagacttggcagcaaagacatttttcctgtacaggatgtttgcccaatgtgtgcaggttatgtgctgctgtagataaggactgtgccattggaaatttcattacaatgaagtgccaaactcactacaccatataattgcagaaaagattttcagatcctggtgtgctttcaagttttgtatataagcagtagatacagattgtatttgtgtgtgtttttggtttttctaaatatccaattggtccaaggaaagtttatactctttttgtaatactgtgatgggcctcatgtcttgataagttaaacttttgtttgtactacctgttttctgcggaactgacggatcacaaagaactgaatctccattctgcatctccattgaacagccttggacctgttcacgttgccacagaattcacatgagaaccaagtagcctgttatcaatctgctaaattaatggacttgttaaacttttggaaaaaaaaagattaaatgccagctttgtacaggtcttttctatttttttttgtttattttgttatttgcaaatttgtacaaacatttaaatggttctaatttccagataaatgatttttgatgttattgttgggacttaagaacatttttggaatagatattgaactgtaataatgttttcttaaaactagagtctactttgttacatagtcagcttgtaaattttgtggaaccacaggtatttgggggcagcattcataattttcattttgtattctaactggattagtactaattttatacatgcttaactggtttgtacactttgggatgctacttagtgatgtttctgactaatcttaaatcattgtaattagtacttgcatattcaacgtttcaggccctggttgggcaggaaagtgatgtatagttatggacactttgcgtttcttatttaggataacttaatatgtttttatgtatgtattttaaagaaatttcactgcttctctgaactatgcgtactgcatagcatcaagtcttctctagagacctctgtagtcctgggaggcctcataatgtttgtagatacagaaagggagactgcatctaaagcaatggtcctttgtcaaacgagggattttgatccacttcaccattttgagttgagctttagcaaaagtttccctcataattctttgctcttgtttcagtccaggtggaggttggttttgtagttctgccttgaggaattatgtcaacactcatacttcatctcattctcccttctgccctgcagattagattacttagcac

SEQ ID NO: 431 - DNA, 1901 bp, Homo sapiens
ggtaccgatttctgctaagttctcccaacaacatgaaactgcctattcacgccgtaattctttctgtctcccttctctctctctctctctcgctcgctcgctctcgctctcgctctctctcgcggcgtcctcatttcccctcccaatcctctctgccctctgcaaccccccagctcgctggctttctctctggcttctctcttttcctcctccacccaccccctttggtttgacaattttgtcttaagtgtttctcaaaagaggttactttagttagcatgcgcgctgtgggcaattgttacaagtgttcttaggtttactgtgaagagaatgtattctgtatccgtgaattgctttatgggaaaaagggagggctaattatatattttgttgttcctctatactttgttctgttgtctgcgcctgaaaagggcggaagagttacaataaagtttacaagcgagaacccgagactggcccggccagcgctcctcatttgctcccgggkgccttgcagagccggtggggagcctgtcaccgggctcctgcgcctgctcaggctaggctgcagagagggagggggcgggggctggaggcaggtggtgcgagtccctcggcccaggggcgctgggggtgagggaggcggctgagcctgattggaggagagaaaaacgagggaggggagccaagagaaaccccctcctctcgcgttccgaggctgcccggccagggaggccagggcgcccaggccacgctggagacctgcggctgggctggtggctgtgtcccccgccacctccctctttgttttgctgtgtgtcctcccaagatgtgtgtcgggaggtggtgtggggggcaggcataaaggtggagtgcaggcctgctgagcatactttttttccctcggactgttgttgttgggggagcaggaggagaagggagaccgctcttccctgcctctccctctcagggacttggccaccttcgctctgttctgaggccatggctctctgccttccttccttcgctgcctctgcttctctggtagtcacgctccactgaggcatccgcctccgggaaccgggagagcagcgggcccgggccaacctccacccttcctttctctccccaccctcccaaccccctttttcttttactttcaaacctttttttttctttttctttctttctttctttttttttttgccaccagaaacggcagcgtccaaggcccgtgggctggatcctgtgccctaggagcacctaggaagacttgctccatctccgcccgcatatctggggcaccaagagagacagagtcgtgagccaggctcgcctcattcctcgtcttgggagaaccggaccaacttccccaaaaggccttgccgtgcagaattggcctggtttaataaagaacagacctgccccaagcacccacccacccagttgcgtgcattcaatccctgcgtttgtctctcgctcggtaacgggctgaagaggatgggtggagggtgacacggatcgccccgaggttatttattttcccttccactcaatctcttcctccccaaatctcgcctgcaagcggcctccagcccgcgggagtcggcagcggcccttgagcccccagccccaatccacagggctcggctttcccattcattattgatcatattttataaatccaacgccacacaattttttccacattaccgggagccgtggggagacggcccggccattggcggaggggacgtcacgtgggcggggtcacgtggtccggagaggaaaaagggggtccttttggtgtaaatctggactctaattctgtaatatatcaaggaatctcgtaaaaccgacactaaaacgtccctgcctacaaatcatccggccaaattatg

SEQ ID NO: 432 - DNA, 2895 bp, Homo sapiens
attttagctgagagttgagcctacttttgccttcttgaaattacacttctggtacctccttcacacagcaattaccgctgaccccagaaagtgctctgtcgactctgcttaacctttgggaagaagaaaacttggaaaaagtctagctctcaaaattatcgctgagaagtggcttaaaacgtacggacacaggctttggtggccccaacgccttaaaaagaaaatgagaaaattttccccttgaaaaattgaatcatttaatgtaaaaccaggttaaacaaggcacatgcctccttcatgggtccagacatttctgggagtctcctgagacctgtctccgtggctctgagggtcaaccaagccttctggcatcaggcaggctgaaagcttgcctggtttccccaatggtgagtgggtttttaaagggccaacttgtggactgctgagcggctataccccacacccccctacatcttgccttctgagtttgccttaattagggaatggggaagtagggttgggggcccgagttcacgtcaaaactgtcaaaggaggtgggggaggggacagagagagaggagtggagaactccctccaggggcaggaaaaattcaaaaatcataaaaggaaaagggggacttgaagcccagaagtcattgtttcctttatttcaaagggaaaaacctgcccgattctcatccttttgattgattaaggccctgaatacctcgcggccccggagtgacagtccctgaataggctcgagcgaataaagcgcagtgcagagcgcggggctggcactcgggggtgtaaaggaggcgagttcgctggcacttaccaagttataaataaaaggctatgcacaatggtaccttctctaaggacagacagtctttacaacactcctggcgtcatatcctgctggggacacttcagctcctagccaagacttcgttccttttatttttccagcagtttagtctgaatgccataataaattcctgagaacaaacgctgaacccgggcaaaactttaacatacagacacatctctgtcgacgcatcggggatctatatgtagagatttagaaccgcagcttgccagagcggtttttacaccaagaagaggagccaggtttttttctgcaccctcccccatacccccagccttcaactaacgagtgcttgggcctagcgacggctgcctgtgcttcacattagccccgcttgcggacggagaagacaaaagaacatcagcgcaccctggactcctcccaggaggagccccatcgggaggaccccttaacaagcctaggccagggggcactgaccacaggaaggaaagctaaatatgtctggggccccagatgccttcttattggaattgtgccccctccagtggcagtaagccaagagaaatgagagcgagacctacaggtagaaaaatgagacatagagagagacacaggaaatcacaagaggaatagaggctgagcgagacacacacacagaggcacagaaagagacagagagggaaatagaaagtcaaggaaagagtgatcagagaaagacacacacacacacacacacacacacacacacacacacacacacacacacacacagagtgacagagacagagagacagagacagagagacaggaacttctccgcccgcagcaactgccatctccctggggctgtctctctcagtttccaccgggccaaccttctctcctgggcaaggggcgcagcgcgggtccccctcggggccagcagaggcctcggcaccaccagagatgggaagagaaagtggtcgctgttgcccaatcagcgcgtgtctccgccacccgggacggtctacccgtcggccaatcgcagctcagggctcctgaccaagctttgggtaaaagaactaataaatgctcccgagcccggatccccgcactcggtgtcaccacaggaggagactcaggcaggccgcgctccagcctcaccaggctccccggctcgccgtggctctctgagcccccttttcagggaccccagtcgctggaacatttgcccagactcgtaccaaacttttccgccctgggctcgggatcctggactccggggcctccccgtcctcccctttcccgggttccagctccggcctctggactaggaaccgacagcccccctccccgcgtccctccctctctctccagccgttttggggaggggctctccacgctccggatagttcccgagggtcatccgcgccgcactcgcctttccgtttcgccttcacctggatataatttccgagcgaagtgcccccaggatgaccacgctggccggcgctgtgcccaggatgatgcggccgggcccggggcagaactacccgcgtagcgggttcccgctggaaggtaagggagggcctcagcgcgccgcctggatcccagggcctgggaccggctgcctcaccccatccccaggctccgcaggctcctttggtgcttccaggaagcccattccctgggcaccccacaccccaagaagcaccagtcgggggcgaggacctactcgatttcctttctgcaaatggagcgcgctgctctctgcaaatcctggcggagctgggcggtcaggcctgcggcgagccggggagacttgtccctgttgttttggaaatgccgcggtggagaaggaggtgaaccggcttctgagcggcagaagcaacttctccgcaatttgtccattcgaaattgtctcgaagttgtctcgaaattgtcccgtgcgcccacacttgtgaaacatatgttagttcagaagtattccctgcaaagttgtggtcgtaacgccgcgccattgtgattggaatttttagaataattaaaaaaattagaattcc

SEQ ID NO: 433 - DNA, 1948 bp, Homo sapiens
gagcgccgggctgacgtgcggcggcgatggaagaacttacggcgttcgtctccaagtcttttgaccagaaagtgaaggagaagaaggaggcgatcacgtaccgggaggtgctggagagcgggccgctgcgcggggccaaggagccgaccggctgcaccgaggcgggccgcgacgaccgcagcagcccggcagtccgggcggccggcggaggcggcggcggaggaggcggaggcggcggcggaggaggcggaggaggtgtaggaggaggtggagcaggcggaggagctggaggagggcgctctcccgtccgggagctggacatgggcgccgccgagagaagcagggagcccggcagcccgcggctgacggaggtgtccccggagctgaaagatcgcaaagacgatgcgaaagggatggaggacgaaggccagaccaaaatcaagcagaggcgaagtcggaccaatttcaccctggaacaactcaatgagctggagaggctttttgacgagacccactatcccgacgccttcatgcgagaggaactgagccagcgactgggcctgtcggaggcccgagtgcaggtttggtttcaaaatcgaagagctaaatgtagaaaacaagaaaatcaactccataaaggtgttctcataggggccgccagccagtttgaagcttgtagagtcgcaccttatgtcaacgtaggtgctttaaggatgccatttcagcaggatagtcattgcaacgtgacgcccttgccctttcaggttcaggcgcagctgcagctggacagcgctgtggcgcacgcgcaccaccacctgcatccgcacctggccgcgcacgcgccctacatgatgttcccagcaccgcccttcggactgccgctcgccacgctggccgcggattcggcttccgccgcctcggtagtggcggccgcagcagccgccaagaccaccagcaaggactccagcatcgccgatctcagactgaaagccaaaaagcacgccgcagccctgggtctgtgacgccaacgccagcaccaatgtcgcgcctgtcccgcggcactcagcctgcacgccctccgcgccccgctgcttctccgttacccctttgagacctcgggagccggccctcttcccgcctcactgaccatccctcgtcccctatcgcatcttggactcggaaagccagactccacgcaggaccagggatctcacgaggcacgcaggctccgtggctcctgcccgttttcctactcgagggcctagaattgggttttgtaggagcgggtttgggggagtctggagagagactggacagggtagtgctggaaccgcggagtttggctcaccgcaaagctacaacgatggactcttgcatagaaaaaaaaaatcttgttaacaatgaaaaaatgagcaaacaaaaaaatcgaaagacaaacgggagagaaaaagaggaaggcaacttatttcttaactgctatttggcagaagctgaaattggagaaccaaggagcaaaaacaaattttaaaattaaagtattttatacatttaaaaatatggaaaaacaacccagacgattctcgagagactggggggagttaccaacttaaatgtgtgttttaaaaaatgcgctaagaaggcaaagcagaaagaagaggtatacttatttaaaaaactaagatgaaaaaagtgcgcaggtgggaagttcacaggttttgaaactgacctttttctgcgaagttcacgttaatacgagaaatttgatgagagaggcgggcctccttttacgttgaatcagatgctttgagtttaaacccaccatgtatggaagagcaagaaaagagaaaatattaaaacgaggagagagaaaaataatggcaaaactgtctggactgctgacagtaaattccggtttgcatggaaaaaaaaaaaaaaaaaaaaaaaaaaa

SEQ ID NO: 434 - DNA, 2897 bp, Homo sapiens
gcgagttgcggtagttgctgtgtaccatggtctcggaggtttctgtcccgcggcccgttaggtcctggtcgggttttcagcgaagcaggccgctcccctgcgtttcccagcgggcgtgctgtgccgcccaacaggctctgcctccaagtgccaaaaactcctagtaaagtttgcgcctcgcccgccgtccacaccccagcggccctgacgctgtcccctccgcgaccctcgcctctggaaaaagtgacaggcaaggccacgcccccgcgagggccggcctggagcccgcagcccccagggcctgggacggtgaggggcgtgaatgcggcggggggcggggccgttgccgggggagggggccggggcgcatgcgcgctgcgcagcggggctgaatgtttcccaagtgtttgaaactggtatttgggttttccacgttggacaagtgcggctcggcggccagcggagcgcgccccttcccgctgcccgctccgctcctctcttctacccagcccagtgggcgagtgggcagcggcggccgcggcgctgggccctctcccgccggtgtgtgcgcgctcgtacgcgcggcccccggcgccagccccgccgcctgagagggggcctgcgccgccggccggggcgtgcgcccgggagccaccgccaccgcggcccgcgccctcaggcgctggggtccccgcggacccggaggcggcggacgggctcggcagatgtagccgccgggccgaagcaggagccggcgggggggcgccgggagagcgagggctttgcattttgcagtgctattttttgaggggggcggggggtggaggaagcggaaagccgcgccgagtcgccggggacctccggggtgaaccatgttgagtcctgccaacggggagcagctccacctggtgaactatgtggaggactacctggactccatcgagtccctgcctttcgacttgcagagaaatgtctcgctgatgcgggagatcgacgcgaaataccaagagatcctgaaggagctagacgagtgctacgagcgcttcagtcgcgagacagacggggcgcagaagcggcggatgctgcactgtgtgcagcgcgcgctgatccgcagccaggagctgggcgacgagaagatccagatcgtgagccagatggtggagctggtggagaaccgcacgcggcaggtggacagccacgtggagctgttcgaggcgcagcaggagctgggcgacacagcgggcaacagcggcaaggctggcgcggacaggcccaaaggcgaggcggcagcgcaggctgacaagcccaacagcaagcgctcacggcggcagcgcaacaacgagaaccgtgagaacgcgtccagcaaccacgaccacgacgacggcgcctcgggcacacccaaggagaagaaggccaagacctccaagaagaagaagcgctccaaggccaaggcggagcgagaggcgtcccctgccgacctccccatcgaccccaacgaacccacgtactgtctgtgcaaccaggtctcctatggggagatgatcggctgcgacaacgacgagtgccccatcgagtggttccacttctcgtgcgtggggctcaatcataaacccaagggcaagtggtactgtcccaagtgccggggggagaacgagaagaccatggacaaagccctggagaaatccaaaaaagagagggcttacaacaggtagtttgtggacaggcgcctggtgtgaggaggacaaaataaaccgtgtatttattacattgctgcctttgttgaggtgcaaggagtgtaaaatgtatatttttaaagaatgttagaaaaggaaccattcctttcatagggatggcagtgattctgtttgccttttgttttcattggtacacgtgtaacaagaaagtggtctgtggatcagcattttagaaactacaaatataggtttgattcaacacttaagtctcagactgatttcttgcgggaggagggggactaaactcaacctaacacattaaatgtggaaggaaaatatttcatttagcttttttattttaatacaagtaatattattactttatgaacaattttttttaattggccatgtcgccaaaaatacagcctatagtaaatgtgtttcttgctgccatgatgtatatccatataacaattcagtaacaaaggtttaaagtttgaagattattttttaaaaaggtaaatggttaaattttacatgacagatattttatctattggcctgttccccaaatggccattttaaaatgcttgggtacacttctcttaagtggtctagtcaaggaacctcaagtcatgcttttgctatcaccaatcatagtgtacccatctttaatttatatcaggtgtataaatgtacatttccaaatgaacttgcacttgttatattataattggaagtgcagtcagcagatgctgttgtgaagctaatgtcacaattatgtgcaaaggtgtgcttcctgctgtatgtgagctgtaaaaatgttacgtgaagaaataaatgaaacttggccagtttgttcctctagtagtatatttaattttgacataagtaacttttaaaatttgtcttaaaaatttatacaccagcaatttagacaaagccttaagcaaattttgtattattgttctcacttattattaataatgaagtagaagttacttaattgccagcaaataaatacgtgtcaaaaaagaatctgtattcagaccctgggtcaggaaattactgcccacttgtcaagttcagcccaccatctgtttgaagattatatgaagtttaaattctagtgtccataaataaagtttcagcggaacacaaaaaaaaaaaaaaaaaaaaaaaaaaaaaaaaaaaaaaaaaaaa

SEQ ID NO: 435 - DNA, 1389 bp, Homo sapiens
atgattcagactgtcccggacccagcagctcatatcaaggaagccttatcagttgtgagtgaggaccagtcgttgtttgagtgtgcctacggaacgccacacctggctaagacagagatgaccgcgtcctcctccagcgactatggacagacttccaagatgagcccacgcgtccctcagcaggattggctgtctcaacccccagccagggtcaccatcaaaatggaatgtaaccctagccaggtgaatggctcaaggaactctcctgatgaatgcagtgtggccaaaggcgggaagatggtgggcagcccagacaccgttgggatgaactacggcagctacatggaggagaagcacatgccacccccaaacatgaccacgaacgagcgcagagttatcgtgccagcagatcctacgctatggagtacagaccatgtgcggcagtggctggagtgggcggtgaaagaatatggccttccagacgtcaacatcttgttattccagaacatcgatgggaaggaactgtgcaagatgaccaaggacgacttccagaggctcacccccagctacaacgccgacatccttctctcacatctccactacctcagagagactcctcttccacatttgacttcagatgatgttgataaagccttacaaaactctccacggttaatgcatgctagaaacacagatttaccatatgagccccccaggagatcagcctggaccggtcacggccaccccacgccccagtcgaaagctgctcaaccatctccttccacagtgcccaaaactgaagaccagcgtcctcagttagatccttatcagattcttggaccaacaagtagccgccttgcaaatccaggcagtggccagatccagctttggcagttcctcctggagctcctgtcggacagctccaactccagctgcatcacctgggaaggcaccaacggggagttcaagatgacggatcccgacgaggtggcccggcgctggggagagcggaagagcaaacccaacatgaactacgataagctcagccgcgccctccgttactactatgacaagaacatcatgaccaaggtccatgggaagcgctacgcctacaagttcgacttccacgggatcgcccaggccctccagccccaccccccggagtcatctctgtacaagtacccctcagacctcccgtacatgggctcctatcacgcccacccacagaagatgaactttgtggcgccccaccctccagccctccccgtgacatcttccagtttttttgctgccccaaacccatactggaattcaccaactgggggtatataccccaacactaggctccccaccagccatatgccttctcatctgggcacttactactaa

SEQ ID NO: 436 - DNA, 4789 bp, Homo sapiens
gctggcctcactcctagctcatctgggcggcggcggcaagtggggacagggcgggtggcgcatcaccggcgcggaggcaggaggagcagtctcattgttccgggagccgtcaccacagtaggtccctcggctcagtcggcccagcccctctcagtcctccccaacccccacaaccgcccgcggctctgagacgcggccccggcggcggcggcagcagctgcagcatcatctccaccctccagccatggaagacctggaccagtctcctctggtctcgtcctcggacagcccaccccggccgcagcccgcgttcaagtaccagttcgtgagggagcccgaggacgaggaggaagaagaggaggaggaagaggaggacgaggacgaagacctggaggagctggaggtgctggagaggaagcccgccgccgggctgtccgcggccccagtgcccaccgcccctgccgccggcgcgcccctgatggacttcggaaatgacttcgtgccgccggcgccccggggacccctgccggccgctccccccgtcgccccggagcggcagccgtcttgggacccgagcccggtgtcgtcgaccgtgcccgcgccatccccgctgtctgctgccgcagtctcgccctccaagctccctgaggacgacgagcctccggcccggcctccccctcctcccccggccagcgtgagcccccaggcagagcccgtgtggaccccgccagccccggctcccgccgcgcccccctccaccccggccgcgcccaagcgcaggggctcctcgggctcagtggatgagaccctttttgctcttcctgctgcatctgagcctgtgatacgctcctctgcagaaaatatggacttgaaggagcagccaggtaacactatttcggctggtcaagaggatttcccatctgtcctgcttgaaactgctgcttctcttccttctctgtctcctctctcagccgcttctttcaaagaacatgaataccttggtaatttgtcaacagtattacccactgaaggaacacttcaagaaaatgtcagtgaagcttctaaagaggtctcagagaaggcaaaaactctactcatagatagagatttaacagagttttcagaattagaatactcagaaatgggatcatcgttcagtgtctctccaaaagcagaatctgccgtaatagtagcaaatcctagggaagaaataatcgtgaaaaataaagatgaagaagagaagttagttagtaataacatccttcataatcaacaagagttacctacagctcttactaaattggttaaagaggatgaagttgtgtcttcagaaaaagcaaaagacagttttaatgaaaagagagttgcagtggaagctcctatgagggaggaatatgcagacttcaaaccatttgagcgagtatgggaagtgaaagatagtaaggaagatagtgatatgttggctgctggaggtaaaatcgagagcaacttggaaagtaaagtggataaaaaatgttttgcagatagccttgagcaaactaatcacgaaaaagatagtgagagtagtaatgatgatacttctttccccagtacgccagaaggtataaaggatcgttcaggagcatatatcacatgtgctccctttaacccagcagcaactgagagcattgcaacaaacatttttcctttgttaggagatcctacttcagaaaataagaccgatgaaaaaaaaatagaagaaaagaaggcccaaatagtaacagagaagaatactagcaccaaaacatcaaacccttttcttgtagcagcacaggattctgagacagattatgtcacaacagataatttaacaaaggtgactgaggaagtcgtggcaaacatgcctgaaggcctgactccagatttagtacaggaagcatgtgaaagtgaattgaatgaagttactggtacaaagattgcttatgaaacaaaaatggacttggttcaaacatcagaagttatgcaagagtcactctatcctgcagcacagctttgcccatcatttgaagagtcagaagctactccttcaccagttttgcctgacattgttatggaagcaccattgaattctgcagttcctagtgctggtgcttccgtgatacagcccagctcatcaccattagaagcttcttcagttaattatgaaagcataaaacatgagcctgaaaaccccccaccatatgaagaggccatgagtgtatcactaaaaaaagtatcaggaataaaggaagaaattaaagagcctgaaaatattaatgcagctcttcaagaaacagaagctccttatatatctattgcatgtgatttaattaaagaaacaaagctttctgctgaaccagctccggatttctctgattattcagaaatggcaaaagttgaacagccagtgcctgatcattctgagctagttgaagattcctcacctgattctgaaccagttgacttatttagtgatgattcaatacctgacgttccacaaaaacaagatgaaactgtgatgcttgtgaaagaaagtctcactgagacttcatttgagtcaatgatagaatatgaaaataaggaaaaactcagtgctttgccacctgagggaggaaagccatatttggaatcttttaagctcagtttagataacacaaaagataccctgttacctgatgaagtttcaacattgagcaaaaaggagaaaattcctttgcagatggaggagctcagtactgcagtttattcaaatgatgacttatttatttctaaggaagcacagataagagaaactgaaacgttttcagattcatctccaattgaaattatagatgagttccctacattgatcagttctaaaactgattcattttctaaattagccagggaatatactgacctagaagtatcccacaaaagtgaaattgctaatgccccggatggagctgggtcattgccttgcacagaattgccccatgacctttctttgaagaacatacaacccaaagttgaagagaaaatcagtttctcagatgacttttctaaaaatgggtctgctacatcaaaggtgctcttattgcctccagatgtttctgctttggccactcaagcagagatagagagcatagttaaacccaaagttcttgtgaaagaagctgagaaaaaacttccttccgatacagaaaaagaggacagatcaccatctgctatattttcagcagagctgagtaaaacttcagttgttgacctcctgtactggagagacattaagaagactggagtggtgtttggtgccagcctattcctgctgctttcattgacagtattcagcattgtgagcgtaacagcctacattgccttggccctgctctctgtgaccatcagctttaggatatacaagggtgtgatccaagctatccagaaatcagatgaaggccacccattcagggcatatctggaatctgaagttgctatatctgaggagttggttcagaagtacagtaattctgctcttggtcatgtgaactgcacgataaaggaactcaggcgcctcttcttagttgatgatttagttgattctctgaagtttgcagtgttgatgtgggtatttacctatgttggtgccttgtttaatggtctgacactactgattttggctctcatttcactcttcagtgttcctgttatttatgaacggcatcaggcacagatagatcattatctaggacttgcaaataagaatgttaaagatgctatggctaaaatccaagcaaaaatccctggattgaagcgcaaagctgaatgaaaacgcccaaaataattagtaggagttcatctttaaaggggatattcatttgattatacgggggagggtcagggaagaacgaaccttgacgttgcagtgcagtttcacagatcgttgttagatctttatttttagccatgcactgttgtgaggaaaaattacctgtcttgactgccatgtgttcatcatcttaagtattgtaagctgctatgtatggatttaaaccgtaatcatatctttttcctatctgaggcactggtggaataaaaaacctgtatattttactttgttgcagatagtcttgccgcatcttggcaagttgcagagatggtggagctagaaaaaaaaaaaaaaaagcccttttcagtttgtgcactgtgtatggtccgtgtagattgatgcagattttctgaaatgaaatgtttgtttagacgagatcataccggtaaagcaggaatgacaaagcttgcttttctggtatgttctaggtgtattgtgacttttactgttatattaattgccaatataagtaaatatagattatatatgtatagtgtttcacaaagcttagacctttaccttccagccaccccacagtgcttgatatttcagagtcagtcattggttatacatgtgtagttccaaagcacataagctagaagaagaaatatttctaggagcactaccatctgttttcaacatgaaatgccacacacatagaactccaacaacatcaatttcattgcacagactgactgtagttaattttgtcacagaatctatggactgaatctaatgcttccaaaaatgttgtttgtttgcaaatatcaaacattgttatgcaagaaattattaattacaaaatgaagatttataccattgtggtttaagctgtactgaactaaatctgtggaatgcattgtgaactgtaaaagcaaagtatcaataaagcttatagacttaaaa

SEQ ID NO: 437 - DNA, 4485 bp, Homo sapiens
gtagacagatccaggctcaccagtcctgtgccactgggcttttggcgttctgcacaaggcctacccgcagatgccatgcctgctcccccagcctaatgggctttgatgggggaagagggtggttcagcctctcacgatgaggaggaaagagcaagtgtcctcctcggacattctccgggttgtgaaatgtgctcgcaggaggcttttcaggcacagaggagccagctggtcgagctgctggtctcagggtccctggaaggcttcgagagtgtcctggactggctgctgtcctgggaggtcctctcctgggaggactacgagggcttccacctcctgggccagcctctctcccacttggccaggcgccttctggacaccgtctggaataagggtacttgggcctgtcagaagctcatcgcggctgcccaagaagcccaggccgacagccagtcccccaagctgcatggctgctgggacccccactcgctccacccagcccgagacctgcagagtcaccggccagccattgtcaggaggctccacagccatgtggagaacatgctggacctggcatgggagcggggtttcgtcagccagtatgaatgtgatgaaatcaggttgccgatcttcacaccgtcccagagggcaagaaggctgcttgatcttgccacggtgaaagcgaatggattggctgccttccttctacaacatgttcaggaattaccagtcccattggccctgcctttggaagctgccacatgcaagaagtatatggccaagctgaggaccacggtgtctgctcagtctcgcttcctcagtacctatgatggagcagagacgctctgcctggaggacatatacacagagaatgtcctggaggtctgggcagatgtgggcatggctggacccccgcagaagagcccagccaccctgggcctggaggagctcttcagcacccctggccacctcaatgacgatgcggacactgtgctggtggtgggtgaggcgggcagtggcaagagcacgctcctgcagcggctgcacttgctgtgggctgcagggcaagacttccaggaatttctctttgtcttcccattcagctgccggcagctgcagtgcatggccaaaccactctctgtgcggactctactctttgagcactgctgttggcctgatgttggtcaagaagacatcttccagttactccttgaccaccctgaccgtgtcctgttaacctttgatggctttgacgagttcaagttcaggttcacggatcgtgaacgccactgctccccgaccgaccccacctctgtccagaccctgctcttcaaccttctgcagggcaacctgctgaagaatgcccgcaaggtggtgaccagccgtccggccgctgtgtcggcgttcctcaggaagtacatccgcaccgagttcaacctcaagggcttctctgaacagggcatcgagctgtacctgaggaagcgccatcatgagcccggggtggcggaccgcctcatccgcctgctccaagagacctcagccctgcacggtttgtgccacctgcctgtcttctcatggatggtgtccaaatgccaccaggaactgttgctgcaggagggggggtccccaaagaccactacagatatgtacctgctgattctgcagcattttctgctgcatgccacccccccagactcagcttcccaaggtctgggacccagtcttcttcggggccgcctccccaccctcctgcacctgggcagactggctctgtggggcctgggcatgtgctgctacgtgttctcagcccagcagctccaggcagcacaggtcagccctgatgacatttctcttggcttcctggtgcgtgccaaaggtgtcgtgccagggagtacggcgcccctggaattccttcacatcactttccagtgcttctttgccgcgttctacctggcactcagtgctgatgtgccaccagctttgctcagacacctcttcaattgtggcaggccaggcaactcaccaatggccaggctcctgcccacgatgtgcatccaggcctcggagggaaaggacagcagcgtggcagctttgctgcagaaggccgagccgcacaaccttcagatcacagcagccttcctggcagggctgttgtcccgggagcactggggcctgctggctgagtgccagacatctgagaaggccctgctccggcgccaggcctgtgcccgctggtgtctggcccgcagcctccgcaagcacttccactccatcccgccagctgcaccgggtgaggccaagagcgtgcatgccatgcccgggttcatctggctcatccggagcctgtacgagatgcaggaggagcggctggctcggaaggctgcacgtggcctgaatgttgggcacctcaagttgacattttgcagtgtgggccccactgagtgtgctgccctggcctttgtgctgcagcacctccggcggcccgtggccctgcagctggactacaactctgtgggtgacattggcgtggagcagctgctgccttgccttggtgtctgcaaggctctgtatttgcgcgataacaatatctcagaccgaggcatctgcaagctcattgaatgtgctcttcactgcgagcaattgcagaagttagctctattcaacaacaaattgactgacggctgtgcacactccatggctaagctccttgcatgcaggcagaacttcttggcattgaggctggggaataactacatcactgccgcgggagcccaagtgctggccgaggggctccgaggcaacacctccttgcagttcctgggattctggggcaacagagtgggtgacgagggggcccaggccctggctgaagccttgggtgatcaccagagcttgaggtggctcagcctggtggggaacaacattggcagtgtgggtgcccaagccttggcactgatgctggcaaagaacgtcatgctagaagaactctgcctggaggagaaccatctccaggatgaaggtgtatgttctctcgcagaaggactgaagaaaaattcaagtttgaaaatcctgaagttgtccaataactgcatcacctacctaggggcagaagccctcctgcaggcccttgaaaggaatgacaccatcctggaagtctggctccgagggaacactttctctctagaggaggttgacaagctcggctgcagggacaccagactcttgctttgaagtctccgggaggatgttcgtctcagtttgtttgtgagcaggctgtgagtttgggccccagaggctgggtgacatgtgttggcagcctcttcaaaatgagccctgtcctgcctaaggctgaacttgttttctgggaacaccataggtcacctttattctggcagaggagggagcatcagtgccctccaggatagacttttcccaagcctacttttgccattgacttcttcccaagattcaatcccaggatgtacaaggacagcccctcctccatagtatgggactggcctctgctgatcctcccaggcttccgtgtgggtcagtggggcccatggatgtgcttgttaactgagtgccttttggtggagaggcccggcctctcacaaaagaccccttaccactgctctgatgaagaggagtacacagaacacataattcaggaagcagctttccccatgtctcgactcatccatccaggccattccccgtctctggttcctcccctcctcctggactcctgcacacgctccttcctctgaggctgaaattcagaatattagtgacctcagctttgatatttcacttacagcacccccaaccctggcacccagggtgggaagggctacaccttagcctgccctcctttccggtgtttaagacatttttggaaggggacacgtgacagccgtttgttccccaagacattctaggtttgcaagaaaaatatgaccacactccagctgggatcacatgtggacttttatttccagtgaaatcagttactcttcagttaagcctttggaaacagctcgactttaaaaagctccaaatgcagctttaaaaaattaatctgggccagaatttcaaacggcctcactaggcttctggttgatgcctgtgaactgaactctgacaacagacttctgaaatagacccacaagaggcagttccatttcatttgtgccagaatgctttaggatgtacagttatggattgaaagtttacaggaaaaaaaattaggccgttccttcaaagcaaatgtcttcctggattattcaaaatgatgtatgttgaagcctttgtaaattgtcagatgctgtgcaaatgttattattttaaacattatgatgtgtgaaaactggttaatatttataggtcactttgttttactgtcttaagtttatactcttatagacaacatggccgtgaactttatgctgtaaataatcagaggggaataaactgttgagtcaaaac

SEQ ID NO: 438 - DNA, 4176 bp, Homo sapiens
ggcggtcccctgttctccccgctcaggtgcggcgctgtggcaggaagccaccccctcggtcggccggtgcgcggggctgttgcgccatccgctccggctttcgtaaccgcaccctgggacggcccagagacgctccagcgcgagttcctcaaatgttttcctgcgttgccaggaccgtccgccgctctgagtcatgtgcgagtgggaagtcgcactgacactgagccgggccagagggagaggagccgagcgcggcgcggggccgagggactcgcagtgtgtgtagagagccgggctcctgcggatgggggctgcccccggggcctgagcccgcctgcccgcccaccgccccgccccgcccctgccacccctgccgcccggttcccattagcctgtccgcctctgcgggaccatggagtggtagccgaggaggaagcatgctggccgtcggctgcgcgctgctggctgccctgctggccgcgccgggagcggcgctggccccaaggcgctgccctgcgcaggaggtggcgagaggcgtgctgaccagtctgccaggagacagcgtgactctgacctgcccgggggtagagccggaagacaatgccactgttcactgggtgctcaggaagccggctgcaggctcccaccccagcagatgggctggcatgggaaggaggctgctgctgaggtcggtgcagctccacgactctggaaactattcatgctaccgggccggccgcccagctgggactgtgcacttgctggtggatgttccccccgaggagccccagctctcctgcttccggaagagccccctcagcaatgttgtttgtgagtggggtcctcggagcaccccatccctgacgacaaaggctgtgctcttggtgaggaagtttcagaacagtccggccgaagacttccaggagccgtgccagtattcccaggagtcccagaagttctcctgccagttagcagtcccggagggagacagctctttctacatagtgtccatgtgcgtcgccagtagtgtcgggagcaagttcagcaaaactcaaacctttcagggttgtggaatcttgcagcctgatccgcctgccaacatcacagtcactgccgtggccagaaacccccgctggctcagtgtcacctggcaagacccccactcctggaactcatctttctacagactacggtttgagctcagatatcgggctgaacggtcaaagacattcacaacatggatggtcaaggacctccagcatcactgtgtcatccacgacgcctggagcggcctgaggcacgtggtgcagcttcgtgcccaggaggagttcgggcaaggcgagtggagcgagtggagcccggaggccatgggcacgccttggacagaatccaggagtcctccagctgagaacgaggtgtccacccccatgcaggcacttactactaataaagacgatgataatattctcttcagagattctgcaaatgcgacaagcctcccagtgcaagattcttcttcagtaccactgcccacattcctggttgctggagggagcctggccttcggaacgctcctctgcattgccattgttctgaggttcaagaagacgtggaagctgcgggctctgaaggaaggcaagacaagcatgcatccgccgtactctttggggcagctggtcccggagaggcctcgacccaccccagtgcttgttcctctcatctccccaccggtgtcccccagcagcctggggtctgacaatacctcgagccacaaccgaccagatgccagggacccacggagcccttatgacatcagcaatacagactacttcttccccagatagctggctgggtggcaccagcagcctggaccctgtggatgataaaacacaaacgggctcagcaaaagatgcttctcactgccatgccagcttatctcaggggtgtgcggcctttggcttcacggaagagccttgcggaaggttctacgccaggggaaaatcagcctgctccagctgttcagctggttgaggtttcaaacctccctttccaaatgcccagcttaaaggggctagagtgaacttgggccactgtgaagagaaccatatcaagactctttggacactcacacggacactcaaaagctgggcaggttggtgggggcctcggtgtggagaagcggctggcagcccacccctcaacacctctgcacaagctgcaccctcaggcaggtgggatggatttccagccaaagcctcctccagccgccatgctcctggcccactgcatcgtttcatcttccaactcaaactcttaaaacccaagtgccttagcaaattctgtttttctaggcctggggacggcttttacttaaaccgccaaggctgggggaagaagctctctcctccctttcttccctacagttgaaaaacagctgagggtgagtgggtgaataatacagtatctcagggcctggtcgttttcaacagaattataattagttcctcattagcattttgctaaatgtgaatgatgatcctaggcatttgctgaatacagaggcaactgcattggctttgggttgcaggacctcaggtgagaagcagaggaaggagaggagaggggcacagggtctctaccatcccctgtagagtgggagctgagtgggggatcacagcctctgaaaaccaatgttctctcttctccacctcccacaaaggagagctagcagcagggagggcttctgccatttctgagatcaaaacggttttactgcagctttgtttgttgtcagctgaacctgggtaactagggaagataatattaaggaagacaatgtgaaaagaaaaatgagcctggcaagaatgtgtttaaacttggtttttaaaaaactgctgactgttttctcttgagagggtggaatatccaatattcgctgtgtcagcatagaagtaacttacttaggtgtgggggaagcaccataactttgtttagcccaaaaccaagtcaagtgaaaaaggaggaagagaaaaaatattttcctgccaggcatggtggcccacgcacttcgggaggtcgaggcaggaggatcacttgagtccagaagtttgagatcagcctgggcaatgtgataaaaccccatctctacaaaaagcataaaaattagccaagtgtggtagagtgtgcctgaagtcccagatacttggggggctgaggtgggaggatctcttgagcctgggaggtcaaggctgcagtgagccgagattgcaccactgcactccagcctgggtgacagagcaagtgagaccctgtctcaaaaaaagaaaaagaaaaagaaaaaatattttccctattagagaagagattgtggtttcattctgtattttgtttttgtcttaaaaagtggaaaaatagcctgcctcttctctactctagggaaaaaccagcgtgtgactactcccccaggtggttatggagagggtgtccggtccctgtcccagtgccgagaaggaagcctcccacgactgcccggcagggtcctagaaattccccaccctgaaagccctgagctttctgctatcaaagaggttttaaaaaaatcccatttaaaaaaaatcccttacctcggtgccttcctctttttatttagttccttgagttgattcagctctgcaagaattgaagcaggactaaatgtctagttgtaacaccatgattaaccacttcagctgacttttctgtccgagctttgaaaattcagtggtgttagtggttacccagttagctctcaagttatcagggtattccagagtggggatatgatttaaatcagccgtgtaaccatggacccaatatttaccagaccacaaaacttttctaatactctaccctcttagaaaaaccaccaccatcaccagacaggtgcgaaaggatgaaagtgaccatgttttgtttacggttttccaggtttaagctgttactgtcttcagtaagccgtgattttcattgctgggcttgtctgtagattttagaccctattgctgcttgaggcaactcatcttaggttggcaaaaaggcaggatggccgggcgcggtggctcacgcctgtaatcctagcactttgggaggccaaggtgggaggattgcttgagctcaggagtttgagaccaacctggg

SEQ ID NO: 439 - DNA, 3587 bp, Homo sapiens
ctaagctggggtccatggagcctgcacccgcccgatctccgaggccccagcaggaccccgcccggccccaggagcccaccatgcctccccccgagaccccctctgaaggccgccagcccagccccagccccagccctacagagcgagcccccgcttcggaggaggagttccagtttctgcgctgccagcaatgccaggcggaagccaagtgcccgaagctgctgccttgtctgcacacgctgtgctcaggatgcctggaggcgtcgggcatgcagtgccccatctgccaggcgccctggcccctaggtgcagacacacccgccctggataacgtctttttcgagagtctgcagcggcgcctgtcggtgtaccggcagattgtggatgcgcaggctgtgtgcacccgctgcaaagagtcggccgacttctggtgctttgagtgcgagcagctcctctgcgccaagtgcttcgaggcacaccagtggttcctcaagcacgaggcccggcccctagcagagctgcgcaaccagtcggtgcgtgagttcctggacggcacccgcaagaccaacaacatcttctgctccaaccccaaccaccgcacccctacgctgaccagcatctactgccgaggatgttccaagccgctgtgctgctcgtgcgcgctccttgacagcagccacagtgagctcaagtgcgacatcagcgcagagatccagcagcgacaggaggagctggacgccatgacgcaggcgctgcaggagcaggatagtgcctttggcgcggttcacgcgcagatgcacgcggccgtcggccagctgggccgcgcgcgtgccgagaccgaggagctgatccgcgagcgcgtgcgccaggtggtagctcacgtgcgggctcaggagcgcgagctgctggaggctgtggacgcgcggtaccagcgcgactacgaggagatggccagtcggctgggccgcctggatgctgtgctgcagcgcatccgcacgggcagcgcgctggtgcagaggatgaagtgctacgcctcggaccaggaggtgctggacatgcacggtttcctgcgccaggcgctctgccgcctgcgccaggaggagccccagagcctgcaagctgccgtgcgcaccgatggcttcgacgagttcaaggtgcgcctgcaggacctcagctcttgcatcacccaggggaaagatgcagctgtatccaagaaagccagcccagaggctgccagcactcccagggaccctattgacgttgacctggccgaggaggcagagagagtgaaggcccaggttcaggccctggggctggctgaagcccagcctatggctgtggtacagtcagtgcccggggcacaccccgtgccagtgtacgccttctccatcaaaggcccttcctatggagaggatgtctccaatacaacgacagcccagaagaggaagtgcagccagacccagtgccccaggaaggtcatcaagatggagtctgaggaggggaaggaggcaaggttggctcggagctccccggagcagcccaggcccagcacctccaaggcagtctcaccaccccacctggatggaccgcctagccccaggagccccgtcataggaagtgaggtcttcctgcccaacagcaaccacgtggccagtggcgccggggaggcagaggaacgcgttgtggtgatcagcagctcggaagactcagatgccgaaaactcggtgagtggcccagaagttcagcccaggactcctgcctccccccatttcaggtcccagggggcacagccacagcaggtgactctcagacttgccttgcgcctggggaattttccagtgaggcattgagtcccaagctgtgctgaggacagtctccaaatgacagctgcatgcctggaccaccccagccctcccactacaccagggccaggagctcttctgaaatgctgatagcatgtgtccagagcactgtctcttttctggaatgtccaagacctttgtctggagcttccttatgcattttctgtcctctaagtcctcagtgaggagggctggacaagaatccattccttggtttattacagccagtgggggccagtgaaggggtgtcaggccacagggcagctatataggggccaaacaagtgaggtttgactccatccatgtagaaagatatataaatccattccacagtgaaacaggtggcctcgtgggtagtgacccttctgtccctagaggtttattactagaggctggactatcacctgtccaggggaaaaggggatctgaatagagtgaaaggttggactgggtggcccctgaggtctcttccagccctcagtctgaggttctgtattggaaagtgcatggaacccatggagaccgccgagccacagtcctcgccagcccactcctcgccagcccactcctcgccagtccagtctctgctgagagcacaaggagcctccagcctgccctgtggcacataccaccccccagcttggcctccccaccagcccgctgagcaggctgccacccccgatgctgagcctcacagcgagcctcctgatcaccaggagcgccctgccgtccaccgtgggatccgctacctgttgtacagagcacagagagccatccgccttcgccatgccctccgcttgcaccctcaattgcatcgggcccctattcggacttggtctccccatgtggtccaagccagcactcctgccatcacagggcccctcaaccatcctgccaatgcccaggaacatcctgcccagctgcaaaggggcatcagcccaccccaccggatacgaggggctgtgcgatcccgcagccgctccctccggggctcctcccatttatcccagtggctcaacaacttttttgccctccccttctcctccatggcttcccagcttgacatgtcttccgtggtgggggcaggggaaggcagagcccagactcttggagcagttgttccccctggggactctgtcagaggctccatggaggcctctcaagtccaagtgcctctggaagcctctccaattacattcccaccaccctgtgccccagaaaggccccccatcagcccagtcccaggcgcccgtcaagcaggcctctgagagtgctacccttctcttgtaaccttgcagccaacacccctgcccggcccctgagctgcctcctccagcccatgctcttacaggccctgcacagagtagcactcattaattcttggttaaggaatgaatcaacgaatgaatggctatgcatggacctctgggcagggagacctgggtcttctctggctgagaggggaaggctaaggcatggctgagattcaagccaccattccaggcctctttgcccaagaaagaaacttctgtcacccttgcactctcctgtgttctgagtccctggccaatagcacagccttccatgccccgacccccaccccaagcctctccactaggcctctgccaggatctaagcccatgagcacagggactggctatcccaagacctggcagatgtggctgctcaataaacacttgttgaaccatcaaaaaaaaaaaaaaa

SEQ ID NO: 440 - DNA, 3046 bp, Homo sapiens
gttggaaacggcactgctgagtgaggttgaggggtgtctcggtatgtgcgccttggatctggtgtaggcgaggtcacgcctctcttcagacagcccgagccttcccggcctggcgcgtttagttcggaactgcgggacgccggtgggctagggcaaggtgtgtgccctcttcctgattctggagaaaaatgccggtccggaagcaagatacccagagagcattgcaccttttggaggaatatcgttcaaaactaagccaaactgaagacagacagctcagaagttccatagaacgggttattaacatatttcagagcaacctctttcaggctttaatagatattcaagaattttatgaagtgaccttactggataatccaaaatgtatagatcgttcaaagccgtctgaaccaattcaacctgtgaatacttgggagatttccagccttccaagctctactgtgacttcagagacactgccaagcagccttagccctagtgtagagaaatacaggtatcaggatgaagatacacctcctcaagagcatatttccccacaaatcacaaatgaagtgataggtccagaattggttcatgtctcagagaagaacttatcagagattgagaatgtccatggatttgtttctcattctcatatttcaccaataaagccaacagaagctgttcttccctctcctcccactgtccctgtgatccctgtcctgccagtccctgctgagaatactgtcatcctacccaccataccacaggcaaatcctcccccagtactggtcaacacagatagcttggaaacaccaacttacgttaatggcacagatgcagattatgaatatgaagaaatcacacttgaaaggggaaattcagggcttggtttcagcattgcaggaggtacggacaacccacacattggagatgactcaagtattttcattaccaaaattatcacagggggagcagccgcccaagatggaagattgcgggtcaatgactgtatattacaagtaaatgaagtagatgttcgtgatgtaacacatagcaaagcagttgaagcgttgaaagaagcagggtctattgtacgcttgtatgtaaaaagaaggaaaccagtgtcagaaaaaataatggaaataaagctcattaaaggtcctaaaggtcttgggtttagcattgctggaggtgttggaaatcagcatattcctggggataatagcatctatgtaaccaaaataattgaaggaggtgcagcacataaggatggcaaacttcagattggagataaacttttagcagtgaataacgtatgtttagaagaagttactcatgaagaagcagtaactgccttaaagaacacatctgattttgtttatttgaaagtggcaaaacccacaagtatgtatatgaatgatggctatgcaccacctgatatcaccaactcttcttctcagcctgttgataaccatgttagcccatcttccttcttgggccagacaccagcatctccagccagatactccccagtttctaaagcagtacttggagatgatgaaattacaagggaacctagaaaagttgttcttcatcgtggctcaacgggccttggtttcaacattgtaggaggagaagatggagaaggaatatttatttcctttatcttagccggaggacctgctgatctaagtggagagctcagaaaaggagatcgtattatatcggtaaacagtgttgacctcagagctgctagtcatgagcaggcagcagctgcattgaaaaatgctggccaggctgtcacaattgttgcacaatatcgacctgaagaatacagtcgttttgaagctaaaatacatgatttacgggagcagatgatgaatagtagtattagttcagggtcaggttctcttcgaactagccagaagcgatccctctatgtcagagccctttttgattatgacaagactaaagacagtgggcttcccagtcagggactgaacttcaaatttggagatatcctccatgttattaatgcttctgatgatgaatggtggcaagccaggcaggttacaccagatggtgagagcgatgaggtcggagtgattcccagtaaacgcagagttgagaagaaagaacgagcccgattaaaaacagtgaaattcaattctaaaacgagagataaagggcagtcattcaatgacaagcgtaaaaagaacctcttttcccgaaaattccccttctacaagaacaaggaccagagtgagcaggaaacaagtgatgctgaccagcatgtaacttctaatgccagcgatagtgaaagtagttaccgtggtcaagaagaatacgtcttatcttatgaaccagtgaatcaacaagaagttaattatactcgaccagtgatcatattgggacctatgaaagacaggataaatgatgacttgatctcagaatttcctgacaaatttggatcctgtgttcctcatacaactagaccaaaacgagattatgaggtagatggaagagattatcattttgtgacttcaagagagcagatggaaaaagatatccaggaacataaattcattgaagctggccagtataacaatcatctatatggaacaagtgttcagtctgtacgagaagtagcaggaaagggcaaacactgtatccttgatgtgtctggaaatgccataaagagattacagattgcacagctttaccctatctccatttttattaaacccaaatccatggaaaatatcatggaaatgaataagcgtctaacagaagaacaagccagaaaaacatttgagagagccatgaaactggaacaggagtttactgaacatttcacagctattgtacagggggatacgctggaagacatttacaaccaagtgaaacagatcatagaagaacaatctggttcttacatctgggttccggcaaaagaaaagctatgaaaactcatgtttctctgtttctcttttccacaattccattttctttggcatctctttgccctttcctctggaaaaaa

SEQ ID NO: 441 - DNA, 5128 bp, Homo sapiens
ccgagtgcctcgcagcccctcccgaggcgcagccgccagaccagtggagccggggcgcagggcgggggcggaggcgccggggcgggggatgcggggccgcggcgcagccccccggccctgagagcgaggacagcgccgcccggcccgcagccgtcgccgcttctccacctcggcccgtggagccggggcgtccgggcgtagccctcgctcgcctgggtcagggggtgcgcgtcgggggaggcagaagccatggatcccgggcagcagccgccgcctcaaccggccccccagggccaagggcagccgccttcgcagcccccgcaggggcagggcccgccgtccggacccgggcaaccggcacccgcggcgacccaggcggcgccgcaggcaccccccgccgggcatcagatcgtgcacgtccgcggggactcggagaccgacctggaggcgctcttcaacgccgtcatgaaccccaagacggccaacgtgccccagaccgtgcccatgaggctccggaagctgcccgactccttcttcaagccgccggagcccaaatcccactcccgacaggccagtactgatgcaggcactgcaggagccctgactccacagcatgttcgagctcattcctctccagcttctctgcagttgggagctgtttctcctgggacactgacccccactggagtagtctctggcccagcagctacacccacagctcagcatcttcgacagtcttcttttgagatacctgatgatgtacctctgccagcaggttgggagatggcaaagacatcttctggtcagagatacttcttaaatcacatcgatcagacaacaacatggcaggaccccaggaaggccatgctgtcccagatgaacgtcacagcccccaccagtccaccagtgcagcagaatatgatgaactcggcttcagccatgaaccagagaatcagtcagagtgctccagtgaaacagccaccacccctggctccccagagcccacagggaggcgtcatgggtggcagcaactccaaccagcagcaacagatgcgactgcagcaactgcagatggagaaggagaggctgcggctgaaacagcaagaactgcttcggcaggtgaggccacaggagttagccctgcgtagccagttaccaacactggagcaggatggtgggactcaaaatccagtgtcttctcccgggatgtctcaggaattgagaacaatgacgaccaatagctcagatcctttccttaacagtggcacctatcactctcgagatgagagtacagacagtggactaagcatgagcagctacagtgtccctcgaaccccagatgacttcctgaacagtgtggatgagatggatacaggtgatactatcaaccaaagcaccctgccctcacagcagaaccgtttcccagactaccttgaagccattcctgggacaaatgtggaccttggaacactggaaggagatggaatgaacatagaaggagaggagctgatgccaagtctgcaggaagctttgagttctgacatccttaatgacatggagtctgttttggctgccaccaagctagataaagaaagctttcttacatggttatagagccctcaggcagactgaattctaaatctgtgaaggatctaaggagacacatgcaccggaaatttccataagccagttgcagttttcaggctaatacagaaaaagatgaacaaacgtccagcaagatactttaatcctctattttgctcttccttgtccattgctgctgttaatgtattgctgacctctttcacagttggctctaaagaatcaaaagaaaaaaactttttatttcttttgctattaaaactactgttcattttgggggctgggggaagtgagcctgtttggatgatggatgccattccttttgcccagttaaatgttcaccaatcattttaactaaatactcagacttagaagtcagatgcttcatgtcacagcatttagtttgttcaacagttgtttcttcagcttcctttgtccagtggaaaaacatgatttactggtctgacaagccaaaaatgttatatctgatattaaatacttaatgctgatttgaagagatagctgaaaccaaggctgaagactgttttactttcagtattttcttttcctcctagtgctatcattagtcacataatgaccttgattttattttaggagcttataaggcatgagacaatttccatataaatatattaattattgccacatactctaatatagattttggtggataattttgtgggtgtgcattttgttctgttttgttgggttttttgttttttttgtttttggcagggtcggtgggggggttggttggttggttggttttgtcggaacctaggcaaatgaccatattagtgaatctgttaatagttgtagcttgggatggttattgtagttgttttggtaaaatcttcatttcctggttttttttaccaccttatttaaatctcgattatctgctctctcttttatatacatacacacacccaaacataacatttataatagtgtggtagtggaatgtatccttttttaggtttccctgctttccagttaatttttaaaatggtagcgctttgtatgcatttagaatacatgactagtagtttatatttcactggtagtttaaatctggttggggcagtctgcagatgtttgaagtagtttagtgttctagaaagagctattactgtggatagtgcctaggggagtgctccacgccctctgggcatacggtagatattatctgatgaattggaaaggagcaaaccagaaatggctttattttctcccttggactaatttttaagtctcgattggaattcagtgagtaggttcataatgtgcatgacagaaataagctttatagtggtttaccttcatttagctttggaagttttctttgccttagttttggaagtaaattctagtttgtagttctcatttgtaatgaacacattaacgactagattaaaatattgccttcaagattgttcttacttacaagacttgctcctacttctatgctgaaaattgaccctggatagaatactataaggttttgagttagctggaaaagtgatcagattaataaatgtatattggtagttgaatttagcaaagaaatagagataatcatgattatacctttatttttacaggaagagatgatgtaactagagtatgtgtctacaggagtaataatggtttccaaagagtattttttaaaggaacaaaacgagcatgaattaactcttcaatataagctatgaagtaatagttggttgtgaattaaagtggcaccagctagcacctctgtgttttaagggtctttcaatgtttctagaataagcccttattttcaagggttcataacaggcataaaatctcttctcctggcaaaagctgctatgaaaagcctcagcttgggaagatagatttttttccccccaattacaaaatctaagtattttggcccttcaatttggaggagggcaaaagttggaagtaagaagttttattttaagtactttcagtgctcaaaaaaatgcaatcactgtgttgtatataatagttcataggttgatcactcataataattgactctaaggcttttattaagaaaacagcagaaagattaaatcttgaattaagtctggggggaaatggccactgcagatggagttttagagtagtaatgaaattctacctagaatgcaaaattgggtatatgaattacatagcatgttgttgggattttttttaatgtgcagaagatcaaagctacttggaaggagtgcctataatttgccagtagccacagattaagattatatcttatatatcagcagattagctttagcttagggggagggtgggaaagtttggggggggggttgtgaagatttagggggaccttgatagagaactttataaacttctttctctttaataaagacttgtcttacaccgtgctgccattaaaggcagctgttctagagtttcagtcacctaagtacacccacaaaacaatatgaatatggagatcttcctttacccctcaactttaatttgcccagttatacctcagtgttgtagcagtactgtgatacctggcacagtgctttgatcttacgatgccctctgtactgacctgaaggagacctaagagtcctttccctttttgagtttgaatcatagccttgatgtggtctcttgttttatgtccttgttcctaatgtaaaagtgcttaactgcttcttggttgtattgggtagcattgggataagattttaactgggtattcttgaattgcttttacaataaaccaattttataatctttaaatttatcaactttttacatttgtgttattttcagtcagggcttcttagatctacttatggttgatggagcacattgatttggagtttcagatcttccaaagcactatttgttgtaataacttttctaaatgtagtgcctttaaaggaaaaatgaacacagggaagtgactttgctacaaataatgttgctgtgttaagtattcatattaaatacatgccttctatatggaacatggcagaaagactgaaaaataacagtaattaattgtgtaattcagaattcataccaatcagtgttgaaactcaaacattgcaaaagtgggtggcaatattcagtgcttaacacttttctagcgttggtacatctgagaaatgagtgctcaggtggattttatcctcgcaagcatgttgttataagaattgtgggtgtgcctatcataacaattgttttctgtatcttgaaaaagtattctccacattttaaatgttttatattagagaattctttaatgcacacttgtcaaatatatatatatagtaccaatgttacctttttattttttgttttagatgtaagagcatgctcatatgttaggtacttacataaattgttacattattttttcttatgtaatacctttttgtttgtttatgtggttcaaatatattctttccttaaaaaaaaaaaaaaaaaaaaaaaaaaaaaaaaaaaaaaa

SEQ ID NO: 442 - DNA, 1367 bp, Homo sapiens
ccggccggccgaagagttcacaagtgtgaagcctgaagccgccgggtgccgctgtgtagaaagaagctaaagcacttccagagcctgctgagctcagaggttcggaagacttatcgaccatggagcgcgcgtcctgcttgttgctgctgctgctgccgctggtgcacgtctctgcgaccacgccagaaccttgtgagctggacgatgaagatttccgctgcgtctgcaacttctccgaacctcagcccgactggtccgaagccttccagtgtgtgtctgcagtagaggtggagatccatgccggcggtctcaacctagagccgtttctaaagcgcgtcgatgcggacgccgacccgcggcagtatgctgacacggtcaaggctctccgcgtgcggcggctcacagtgggagccgcacaggttcctgctcagctactggtaggcgccctgcgtgtgctagcgtactcccgcctcaaggaactgacgctcgaggacctaaagataaccggcaccatgcctccgctgcctctggaagccacaggacttgcactttccagcttgcgcctacgcaacgtgtcgtgggcgacagggcgttcttggctcgccgagctgcagcagtggctcaagccaggcctcaaggtactgagcattgcccaagcacactcgcctgccttttcctgcgaacaggttcgcgccttcccggcccttaccagcctagacctgtctgacaatcctggactgggcgaacgcggactgatggcggctctctgtccccacaagttcccggccatccagaatctagcgctgcgcaacacaggaatggagacgcccacaggcgtgtgcgccgcactggcggcggcaggtgtgcagccccacagcctagacctcagccacaactcgctgcgcgccaccgtaaaccctagcgctccgagatgcatgtggtccagcgccctgaactccctcaatctgtcgttcgctgggctggaacaggtgcctaaaggactgccagccaagctcagagtgctcgatctcagctgcaacagactgaacagggcgccgcagcctgacgagctgcccgaggtggataacctgacactggacgggaatcccttcctggtccctggaactgccctcccccacgagggctcaatgaactccggcgtggtcccagcctgtgcacgttcgaccctgtcggtgggggtgtcgggaaccctggtgctgctccaaggggcccggggctttgcctaagatccaagacagaataatgaatggactcaaactgccttggcttcaggggagtcccgtcaggacgttgaggacttttcgaccaattcaaccctttgccccacctttattaaaatcttaaac

SEQ ID NO: 443 - DNA, 2178 bp, Homo sapiens
gtgtgtgtggtttttttttttaagtgttagatgttttcgatattttaaaaaagcatctaggctgcttgtggaagtcagaccaaaatagcaggaaggtattgcagcaagatggatttgggaaaggaccaatctcatttgaagcaccatcagacacctgaccctcatcaagaagagaaccattctccagaagtcattggaacctggagtttgagaaacagagaactacttagaaaaagaaaagctgaagtgcatgaaaaggaaacatcacaatggctatttggagaacagaaaaaacgcaagcagcagagaacaggaaaaggaaatcgaagaggcagaaagagacaacaaaacacagaattgaaggtggagcctcagccacagatagaaaaggaaatagtggagaaagcactggcacctatagagaaaaaaactgagccacctgggagcataaccaaagtatttccttcagtagcctccccgcaaaaagttgtgcctgaggaacacttttctgaaatatgtcaagaaagtaacatatatcaggagaatttttctgagtaccaagaaatagcagtacaaaaccattcttctgaaacatgccaacatgtgtctgaacctgaagacctctctcctaaaatgtaccaagaaatatctgtacttcaagacaattcttccaaaatatgccaagacatgaaggaacctgaagacaactctcctaacacatgccaagtaatatctgtaattcaagaccatcctttcaaaatgtaccaagatatggctaaacgagaagatctggctcctaaaatgtgccaagaagctgctgtacccaaaatccttccttgtccaacatctgaagacacagctgatctggcaggatgctctcttcaagcatatccaaaaccagatgtgcctaaaggctatattcttgacacagaccaaaatccagcagaaccagaggaatacaatgaaacagatcaaggaatagctgagacagaaggcctttttcctaaaatacaagaaatagctgagcctaaagacctttctacaaaaacacaccaagaatcagctgaacctaaataccttcctcataaaacatgtaacgaaattattgtgcctaaagccccctctcataaaacaatccaagaaacacctcattctgaagactattcaattgaaataaaccaagaaactcctgggtctgaaaaatattcacctgaaacgtatcaagaaatacctgggcttgaagaatattcacctgaaatataccaagaaacatcccagcttgaagaatattcacctgaaatataccaagaaacaccggggcctgaagacctctctactgagacatataaaaataaggatgtgcctaaagaatgctttccagaaccacaccaagaaacaggtgggccccaaggccaggatcctaaagcacaccaggaagatgctaaagatgcttatacttttcctcaagaaatgaaagaaaaacccaaagaagagccaggaataccagcaattctgaatgagagtcatccagaaaatgatgtctatagttatgttttgttttaacaatgctcaaccataaagttgtggtccaatggaacatacagcttaatagtttatgcgtgattttctcaaaatattgtaaaacttttgccaatgctcattaatattattttttctatttgtagaccatatctgaaagaaataacattttttaaggctctaccacatagacaatatcatgctagaatgtgtgtgtgtgtgtgtgtgtgtgtgtgtgtatgtatgtataggtcggggagaggatagtggtgggaacagacaaataaggaagcggggaggactggataattggttttcccccctaagaacatttatttacgtcttaagagcagataagtgactaagactgaacacatacattttgtggagtatatagttttcttgtaaatgctgttcaattattaatgtaacagtagcatcaaaattttattcaggctttagttgactcttttggtcagttttaacaattctccttaaaagatattttggagtgatgaatgtagtttacttttgtatttgaattttgattttctatttttattttttaaatattgtatttgtgcacaatgtacattaaatcattattacatgctaaaaaaaaaaaaaaaaaaaaaaaaa

SEQ ID NO: 444 - DNA, 8694 bp, Homo sapiens
tgaggaatcaacagccgccatcttgtcgcggacccgaccggggcttcgagcgcgatctactcggccccgccggtcccgggccccacaaccgcccgcgctcgctcctctccctcgcagccggcagggcccccgacccccgtccgggccctcgccggcccggccgcccgtgcccggggctgttttcgcgagcaggtgaaaatggctgagaacttgctggacggaccgcccaaccccaaaagagccaaactcagctcgcccggtttctcggcgaatgacagcacagattttggatcattgtttgacttggaaaatgatcttcctgatgagctgatacccaatggaggagaattaggccttttaaacagtgggaaccttgttccagatgctgcttccaaacataaacaactgtcggagcttctacgaggaggcagcggctctagtatcaacccaggaataggaaatgtgagcgccagcagccccgtgcagcagggcctgggtggccaggctcaagggcagccgaacagtgctaacatggccagcctcagtgccatgggcaagagccctctgagccagggagattcttcagcccccagcctgcctaaacaggcagccagcacctctgggcccacccccgctgcctcccaagcactgaatccgcaagcacaaaagcaagtggggctggcgactagcagccctgccacgtcacagactggacctggtatctgcatgaatgctaactttaaccagacccacccaggcctcctcaatagtaactctggccatagcttaattaatcaggcttcacaagggcaggcgcaagtcatgaatggatctcttggggctgctggcagaggaaggggagctggaatgccgtaccctactccagccatgcagggcgcctcgagcagcgtgctggctgagaccctaacgcaggtttccccgcaaatgactggtcacgcgggactgaacaccgcacaggcaggaggcatggccaagatgggaataactgggaacacaagtccatttggacagccctttagtcaagctggagggcagccaatgggagccactggagtgaacccccagttagccagcaaacagagcatggtcaacagtttgcccaccttccctacagatatcaagaatacttcagtcaccaacgtgccaaatatgtctcagatgcaaacatcagtgggaattgtacccacacaagcaattgcaacaggccccactgcagatcctgaaaaacgcaaactgatacagcagcagctggttctactgcttcatgctcataagtgtcagagacgagagcaagcaaacggagaggttcgggcctgctcgctcccgcattgtcgaaccatgaaaaacgttttgaatcacatgacgcattgtcaggctgggaaagcctgccaagttgcccattgtgcatcttcacgacaaatcatctctcattggaagaactgcacacgacatgactgtcctgtttgcctccctttgaaaaatgccagtgacaagcgaaaccaacaaaccatcctggggtctccagctagtggaattcaaaacacaattggttctgttggcacagggcaacagaatgccacttctttaagtaacccaaatcccatagaccccagctccatgcagcgagcctatgctgctctcggactcccctacatgaaccagccccagacgcagctgcagcctcaggttcctggccagcaaccagcacagcctcaaacccaccagcagatgaggactctcaaccccctgggaaataatccaatgaacattccagcaggaggaataacaacagatcagcagcccccaaacttgatttcagaatcagctcttccgacttccctgggggccacaaacccactgatgaacgatggctccaactctggtaacattggaaccctcagcactataccaacagcagctcctccttctagcaccggtgtaaggaaaggctggcacgaacatgtcactcaggacctgcggagccatctagtgcataaactcgtccaagccatcttcccaacacctgatcccgcagctctaaaggatcgccgcatggaaaacctggtagcctatgctaagaaagtggaaggggacatgtacgagtctgccaacagcagggatgaatattatcacttattagcagagaaaatctacaagatacaaaaagaactagaagaaaaacggaggtcgcgtttacataaacaaggcatcttggggaaccagccagccttaccagccccgggggctcagccccctgtgattccacaggcacaacctgtgagacctccaaatggacccctgtccctgccagtgaatcgcatgcaagtttctcaagggatgaattcatttaaccccatgtccttggggaacgtccagttgccacaagcacccatgggacctcgtgcagcctccccaatgaaccactctgtccagatgaacagcatgggctcagtgccagggatggccatttctccttcccgaatgcctcagcctccgaacatgatgggtgcacacaccaacaacatgatggcccaggcgcccgctcagagccagtttctgccacagaaccagttcccgtcatccagcggggcgatgagtgtgggcatggggcagccgccagcccaaacaggcgtgtcacagggacaggtgcctggtgctgctcttcctaaccctctcaacatgctggggcctcaggccagccagctaccttgccctccagtgacacagtcaccactgcacccaacaccgcctcctgcttccacggctgctggcatgccatctctccagcacacgacaccacctgggatgactcctccccagccagcagctcccactcagccatcaactcctgtgtcgtcttccgggcagactcccaccccgactcctggctcagtgcccagtgctacccaaacccagagcacccctacagtccaggcagcagcccaggcccaggtgaccccgcagcctcaaaccccagttcagcccccgtctgtggctacccctcagtcatcgcagcaacagccgacgcctgtgcacgcccagcctcctggcacaccgctttcccaggcagcagccagcattgataacagagtccctaccccctcctcggtggccagcgcagaaaccaattcccagcagccaggacctgacgtacctgtgctggaaatgaagacggagacccaagcagaggacactgagcccgatcctggtgaatccaaaggggagcccaggtctgagatgatggaggaggatttgcaaggagcttcccaagttaaagaagaaacagacatagcagagcagaaatcagaaccaatggaagtggatgaaaagaaacctgaagtgaaagtagaagttaaagaggaagaagagagtagcagtaacggcacagcctctcagtcaacatctccttcgcagccgcgcaaaaaaatctttaaaccagaggagttacgccaggccctcatgccaaccctagaagcactgtatcgacaggacccagagtcattacctttccggcagcctgtagatccccagctcctcggaattccagactattttgacatcgtaaagaatcccatggacctctccaccatcaagcggaagctggacacagggcaataccaagagccctggcagtacgtggacgacgtctggctcatgttcaacaatgcctggctctataatcgcaagacatcccgagtctataagttttgcagtaagcttgcagaggtctttgagcaggaaattgaccctgtcatgcagtcccttggatattgctgtggacgcaagtatgagttttccccacagactttgtgctgctatgggaagcagctgtgtaccattcctcgcgatgctgcctactacagctatcagaataggtatcatttctgtgagaagtgtttcacagagatccagggcgagaatgtgaccctgggtgacgacccttcacagccccagacgacaatttcaaaggatcagtttgaaaagaagaaaaatgataccttagaccccgaacctttcgttgattgcaaggagtgtggccggaagatgcatcagatttgcgttctgcactatgacatcatttggccttcaggttttgtgtgcgacaactgcttgaagaaaactggcagacctcgaaaagaaaacaaattcagtgctaagaggctgcagaccacaagactgggaaaccacttggaagaccgagtgaacaaatttttgcggcgccagaatcaccctgaagccggggaggtttttgtccgagtggtggccagctcagacaagacggtggaggtcaagcccgggatgaagtcacggtttgtggattctggggaaatgtctgaatctttcccatatcgaaccaaagctctgtttgcttttgaggaaattgacggcgtggatgtctgcttttttggaatgcacgtccaagaatacggctctgattgcccccctccaaacacgaggcgtgtgtacatttcttatctggatagtattcatttcttccggccacgttgcctccgcacagccgtttaccatgagatccttattggatatttagagtatgtgaagaaattagggtatgtgacagggcacatctgggcctgtcctccaagtgaaggagatgattacatcttccattgccacccacctgatcaaaaaatacccaagccaaaacgactgcaggagtggtacaaaaagatgctggacaaggcgtttgcagagcggatcatccatgactacaaggatattttcaaacaagcaactgaagacaggctcaccagtgccaaggaactgccctattttgaaggtgatttctggcccaatgtgttagaagagagcattaaggaactagaacaagaagaagaggagaggaaaaaggaagagagcactgcagccagtgaaaccactgagggcagtcagggcgacagcaagaatgccaagaagaagaacaacaagaaaaccaacaagaacaaaagcagcatcagccgcgccaacaagaagaagcccagcatgcccaacgtgtccaatgacctgtcccagaagctgtatgccaccatggagaagcacaaggaggtcttcttcgtgatccacctgcacgctgggcctgtcatcaacaccctgccccccatcgtcgaccccgaccccctgctcagctgtgacctcatggatgggcgcgacgccttcctcaccctcgccagagacaagcactgggagttctcctccttgcgccgctccaagtggtccacgctctgcatgctggtggagctgcacacccagggccaggaccgctttgtctacacctgcaacgagtgcaagcaccacgtggagacgcgctggcactgcactgtgtgcgaggactacgacctctgcatcaactgctataacacgaagagccatgcccataagatggtgaagtgggggctgggcctggatgacgagggcagcagccagggcgagccacagtcaaagagcccccaggagtcacgccgggtgagcatccagcgctgcatccagtcgctggtgcacgcgtgccagtgccgcaacgccaactgctcgctgccatcctgccagaagatgaagcgggtggtgcagcacaccaagggctgcaaacgcaagaccaacgggggctgcccggtgtgcaagcagctcatcgccctctgctgctaccacgccaagcactgccaagaaaacaaatgccccgtgcccttctgcctcaacatcaaacacaagctccgccagcagcagatccagcaccgcctgcagcaggcccagctcatgcgccggcggatggccaccatgaacacccgcaacgtgcctcagcagagtctgccttctcctacctcagcaccgcccgggacccccacacagcagcccagcacaccccagacgccgcagccccctgcccagccccaaccctcacccgtgagcatgtcaccagctggcttccccagcgtggcccggactcagccccccaccacggtgtccacagggaagcctaccagccaggtgccggcccccccacccccggcccagccccctcctgcagcggtggaagcggctcggcagatcgagcgtgaggcccagcagcagcagcacctgtaccgggtgaacatcaacaacagcatgcccccaggacgcacgggcatggggaccccggggagccagatggcccccgtgagcctgaatgtgccccgacccaaccaggtgagcgggcccgtcatgcccagcatgcctcccgggcagtggcagcaggcgccccttccccagcagcagcccatgccaggcttgcccaggcctgtgatatccatgcaggcccaggcggccgtggctgggccccggatgcccagcgtgcagccacccaggagcatctcacccagcgctctgcaagacctgctgcggaccctgaagtcgcccagctcccctcagcagcaacagcaggtgctgaacattctcaaatcaaacccgcagctaatggcagctttcatcaaacagcgcacagccaagtacgtggccaatcagcccggcatgcagccccagcctggcctccagtcccagcccggcatgcaaccccagcctggcatgcaccagcagcccagcctgcagaacctgaatgccatgcaggctggcgtgccgcggcccggtgtgcctccacagcagcaggcgatgggaggcctgaacccccagggccaggccttgaacatcatgaacccaggacacaaccccaacatggcgagtatgaatccacagtaccgagaaatgttacggaggcagctgctgcagcagcagcagcaacagcagcagcaacaacagcagcaacagcagcagcagcaagggagtgccggcatggctgggggcatggcggggcacggccagttccagcagcctcaaggacccggaggctacccaccggccatgcagcagcagcagcgcatgcagcagcatctccccctccagggcagctccatgggccagatggcggctcagatgggacagcttggccagatggggcagccggggctgggggcagacagcacccccaacatccagcaagccctgcagcagcggattctgcagcaacagcagatgaagcagcagattgggtccccaggccagccgaaccccatgagcccccagcaacacatgctctcaggacagccacaggcctcgcatctccctggccagcagatcgccacgtcccttagtaaccaggtgcggtctccagcccctgtccagtctccacggccccagtcccagcctccacattccagcccgtcaccacggatacagccccagccttcgccacaccacgtctcaccccagactggttccccccaccccggactcgcagtcaccatggccagctccatagatcagggacacttggggaaccccgaacagagtgcaatgctcccccagctgaacacccccagcaggagtgcgctgtccagcgaactgtccctggtcggggacaccacgggggacacgctagagaagtttgtggagggcttgtagcattgtgagagcatcaccttttccctttcatgttcttggaccttttgtactgaaaatccaggcatctaggttctttttattcctagatggaactgcgacttccgagccatggaagggtggattgatgtttaaagaaacaatacaaagaatatatttttttgttaaaaaccagttgatttaaatatctggtctctctctttggtttttttttggcgggggggtggggggggttcttttttttccgttttgtttttgtttggggggaggggggttttgtttggattctttttgtcgtcattgctggtgactcatgcctttttttaacgggaaaaacaagttcattatattcatattttttatttgtattttcaagactttaaacatttatgtttaaaagtaagaagaaaaataatattcagaactgattcctgaaataatgcaagcttataatgtatcccgataactttgtgatgtttcgggaagatttttttctatagtgaactctgtgggcgtctcccagtattaccctggatgataggaattgactccggcgtgcacacacgtacacacccacacacatctatctatacataatggctgaagccaaacttgtcttgcagatgtagaaattgttgctttgtttctctgataaaactggttttagacaaaaaatagggatgatcactcttagaccatgctaatgttactagagaagaagccttcttttctttcttctatgtgaaacttgaaatgaggaaaagcaattctagtgtaaatcatgcaagcgctctaattcctataaatacgaaactcgagaagattcaatcactgtatagaatggtaaaataccaactcatttcttatatcatattgttaaataaactgtgtgcaacagacaaaaagggtggtccttcttgaattcatgtacatggtattaacacttagtgttcggggttttttgttatgaaaatgctgttttcaacattgtatttggactatgcatgtgttttttccccattgtatataaagtaccgcttaaaattgatataaattactgaggtttttaacatgtattctgttctttaagatcccctgtaagaatgtttaaggtttttatttatttatatatattttttggtctgttctttgtaaaaaaaaaaaaaaaaa

SEQ ID NO: 445 - DNA, 3511 bp, Homo sapiens
cggggcggcggcgggggccgggggggcccgggcgcgcgggagcgggagcggccgggggagccggagcgcaccatggaggcggcggcaggcggccgcggctgtttccagccgcacccggggctgcagaagacgctggagcagttccacctgagctccatgagctcgctgggcggcccggccgctttctcggcgcgctgggcgcaggaggcctacaagaaggagagcgccaaggaggcgggcgcggccgcggtgccggcgccggtgcccgcagccaccgagccgccgcccgtgctgcacctgcccgccatccagccgccgccgcccgtgctgcccgggcccttcttcatgccgtccgaccgctccaccgagcgctgcgagaccgtactggaaggcgagaccatctcgtgcttcgtggtgggaggcgagaagcgcctgtgtctgccgcagattctcaactcggtgctgcgcgacttctcgctgcagcagatcaacgcggtgtgcgacgagctccacatctactgctcgcgctgcacggccgaccagctggagatcctcaaagtcatgggcatcctgcccttctcggcgccctcgtgcgggctcatcaccaagacggacgccgagcgcctgtgcaacgcgctgctctacggcggcgcctacccgccgccctgcaagaaggagctggccgccagcctggcgctgggcctggagctcagcgagcgcagcgtccgcgtgtaccacgagtgcttcggcaagtgtaaggggctgctggtgcccgagctctacagcagcccgagcgccgcctgcatccagtgcctggactgccgcctcatgtacccgccgcacaagttcgtggtgcactcgcacaaggccctggagaaccggacctgccactggggcttcgactcggccaactggcgggcctacatcctgctgagccaggattacacgggcaaggaggagcaggcgcgcctcggccgctgcctggacgacgtgaaggagaaattcgactatggcaacaagtacaagcggcgggtgccccgggtctcctctgagcctccggcctccataagacccaaaacagatgacacctcttcccagtcccccgcgccttccgaaaaggacaagccgtccagctggctgcggaccttggccggctcttccaataagagcctgggctgtgttcaccctcgccagcgcctctctgctttccgaccctggtcccccgcagtgtcagcgagtgagaaagagctctccccacacctcccggccctcatccgagacagcttctactcctacaagagctttgagacagccgtggcgcccaacgtggccctcgcaccgccggcccagcagaaggttgtgagcagccctccgtgtgccgccgccgtctcccgggcccccgagcctctcgccacttgcacccagcctcggaagcggaagctgactgtggacaccccaggagccccagagacgctggcgcccgtggctgccccagaggaggacaaggactcggaggcggaggtggaagttgaaagcagggaggaattcacctcctccttgtcctcgctctcttccccgtcctttacctcatccagctccgccaaggacctgggctccccgggtgcgcgtgccctgccctcggccgtccctgatgctgcggcccctgccgacgcccccagtgggctggaggcggagctggagcacctgcggcaggcactggagggcggcctggacaccaaggaagccaaagagaagttcctgcatgaggtggtcaagatgcgcgtgaagcaggaggagaagctcagcgcagccctgcaggccaagcgcagcctccaccaggagctggagttcctacgcgtggccaagaaggagaagctgcgggaggccacggaggccaagcgtaacctgcggaaggagatcgagcgtctccgcgccgagaacgagaagaagatgaaagaggccaacgagtcacggctgcgcctgaagcgggagctggagcaggcgcggcaggcccgggtgtgcgacaagggctgcgaggcgggccgcctgcgcgccaagtactcggcccagatcgaagacctgcaggtgaagctgcagcacgcggaggcggaccgggagcagctgcgggccgacctgctgcgggagcgcgaggcccgggagcacctggagaaggtggtgaaggagctgcaggaacagctgtggccgcgggcccgccccgaggctgcgggcagcgagggcgctgcggagctggagccgtagattccgtgcctgccgccgcagcgccgccgacaacgcgggtgcaggggggcgcggctgggcggtgcagctccgcccggctccgcccctgcagcccacacagcacaacgtcttaccgtgcctattaccaagcgagtgtttgtaaccatgtagttttggaacccactgcaaaattttctactggccaagttcaagtgagtaagccgcgtcccccaactacagctggagacggggccagctcggcggcctgctggtcctctgcttgctggaacattctaacatttacacttttgttataagctatttaaaaccagtaaggagacttgaaattcagaaaatcaacacatttttaaatgactaacttctaaaagccccaacacatgacgccatctgaagacccgcaacggagtgggggtggcggccgccccaccctccccacccggggaagccatcacagctcatctgcccgcggctgcgtgaggacagcaggggtttttcttcagagtctattttttcagcgacaaggacccaggtcttcctgctgctgccagggagagcagggacagtgccgcgtgcgagatgagctcgaacactgcccgccttactgccgcctaccccgcccgccacgccgccgtcgatgccagcgctgtccccacgggtaccaggaagtgcagagccgcacaggagctgccccggagctgaggggacggtcttcggctcctctgcaccccgtgattctgcccacgctcctccaccacgaggcactgacctgcgtcgggtggtgaccgtggctggcggtcacgccctcagccctccgggcacacgtgccgcctgaccgggcgacccttttcagttcggcaaacgtcgctcccttcattttgggactgaggctgcagcattggaacaaaagagcattatttcaatttttctttctttttttttgttcgttcatttaaacgtatatttagaactgcactttgtccacaaccttcccttctctttctattccccagtgaactgaggtttttaccgactttatagagcagtcaaatccgaagtgctcgagtgcttagaaaccccctctggtgcttggttgaacaagggaatcacaaaaaaacgaaaatgcaaaaactgaacttcgggggtcgttctgtgccttccagcatcttgtacagcaaatcctgactcgtgtctttttacccccaagatatctgtcttcagtagcgactgaatctgccactctcagaataagttc

SEQ ID NO: 446 - DNA, 6999 bp, Homo sapiens
cctcagcgctgggcggccgctcacctcgggccggggggcgccgcgcctcccgcggagtggccgcgcccgctcggagccgtcccgcctgtcctgcccgcccgtccgtccggcgcggcgctcggggtggcggctgctcggcatggcccggggcgcccggccctcggcggccggtggcggcggcggcggcgcggagccccctgagcgcgcgggccccgggcggccgcggggatccccgcccggccgcgcccgcccctcgctggcgccgcgccccggcccggagccctcgcgaccccgggcggcgcccgagacccccggcggggacacggcgggcgcggggcggtgcggcgggcggcgggcggcaaagttggggccgggccgccgcggctggtgggcgctgctggcgctgcagctgcacttgctccgggcgctggcgcaagatgatgttgctccatattttaaaacggagccaggcctaccacagatccacctggaagggaaccgccttgttctcacctgccttgccgaagggagctggcctttggagttcaagtggatgcgcgatgacagtgagctcaccacctacagcagcgaatataagtacattattccatctttgcagaagctcgatgctgggttttaccgctgcgtggtgcgaaacagaatgggagcactcctgcaaagaaaatcagaagttcaagtcgcatatatgggaagtttcatggatacggaccagaggaaaacagtttctcaaggacgtgcagcgattctaaacctgctgcccatcaccagctaccccagacctcaagtgacttggtttagagaagggcacaagattattccaagcaacagaatagccatcacattggagaatcagctggtgatcctcgccaccacaaccagtgatgccggggcatactacgtgcaggccgtgaatgagaaaaatggagaaaacaagacaagcccattcattcatttgagcatagcaagagatgttggcacacctgaaaccatggccccaaccattgtggttcccccgggcaacagaagtgtggtggctggatccagtgagaccaccttggaatgtatagccagtgccaggcctgtggaggacctgagtgtgacctggaagaggaatggagtgagaatcaccagtggcctccacagctttggaagacacctcaccatcagcaacccgacgtccgcggacaccgggccatacgtctgcgaggcggcgctgccggggagcgcttttgaaccggccagggcgacggcctttcttttcatcatagagccaccatattttactgctgagcccgagagtcggatttcagctgaagtagaagaaactgtggacatcggatgtcaagccatgggggtcccccttcccaccctccagtggtacaaggatgccatctccatcagcaggctccagaatcctcgatacaaagtgctcgccagcggaggcctgcgcatccagaagctgcgtccagaggactccggaatcttccagtgcttcgccagcaatgaaggaggggagatccagacccacacctacctggatgtaaccaatatcgctccagtgttcacccagcggccagtggacaccacagttactgacgggatgacagccattctaaggtgtgaggtgtccggggctcccaaacccgccatcacctggaaaagagaaaaccacattctggccagtggctctgtccggattcctaggttcatgcttcttgaatcggggggtctacagatcgcgcccgtcttcatccaggatgccggcaactacacctgctatgcggccaacacagagggctccctgaatgcatcggccacgctcactgtgtggaatcggacgtccatcgtccaccctcctgaggaccacgtggtgattaaggggaccacggccacgctgcactgtggtgccacacatgacccccgggtttcactccgctacgtttggaagaaggacaacgtggccctgactccatcgagcacgtctaggatcgtggtggagaaggacgggtcccttctcatcagccagacgtggtcaggcgacatcggtgactacagctgcgagattgtttctgaaggagggaatgactccaggatggcccggctggaagtgattgaactgcctcattcacctcagaacctcctggtcagccctaattcttcccacagccacgccgtggtgctctcttgggtccggccctttgatggaaacagtcctattctttattacatcgtggagctgtctgaaaacagctctccatggaaggtgcatctgtcaaacgttggccctgagatgacaggcgtcaccgtgagtggcctgactccggctcgtacctatcaattccgggtgtgcgcggtgaatgaagtgggcaggggccagtacagcgccgagacaagcaggttgatgctacctgaagaaccacccagtgctcccccgaaaaatatagtggccagtgggcggactaatcagtccattatggtccagtggcagccacccccagaaacagagcacaacggggtgttgcgtggatacatcctcaggtaccgcctggctggccttcccggagagtaccagcagcggaacatcaccagcccggaggtgaactactgcctggtgacagacctgatcatctggacacagtatgagatacaggtggcggcgtacaacggggccggtctgggcgtcttcagcagggcagtgaccgagtacaccttgcagggagtgcccaccgcgcccccgcagaacgtgcagacggaagccgtgaactccaccaccattcagttcctgtggaaccctccgcctcagcagtttatcaatggcatcaaccagggatacaagcttctggcatggccggcagatgcccccgaggctgtcactgtggtcactattgccccagatttccacggagtccaccatggacacataacgaacctgaagaagtttaccgcctacttcacttccgttctgtgcttcaccacccctggggacgggcctcccagcacacctcagctggtctggactcaggaagacaaaccaggagctgtgggacatctgagtttcacagagatcttggacacatctctcaaggtcagctggcaggagcccctggagaaaaatggcatcattactggctatcagatctcttgggaagtgtacggcaggaacgactctcgtctcacgcacaccctgaacagcacgacgcacgagtacaagatccaaggcctctcatctctcaccacctacaccatcgacgtggccgctgtgactgccgtgggcactggcctggtgacttcatccaccatttcttctggagtgcccccagaccttcctggtgccccatccaacctggtcatttccaacatcagccctcgctccgccacccttcagttccggccaggctatgacgggaaaacgtccatctccaggtggattgttgaggggcaggtgggagctatcggcgacgaggaggagtgggtcaccctctatgaagaggagaatgagcctgatgcccagatgctggagatcccaaacctcacaccctacactcactacagatttcgaatgaagcaagtgaacattgttgggccgagcccctacagtccgtcttcccgggtcatccagaccctgcaggccccacccgacgtggctccaaccagcgtcacggtccgtactgccagtgagaccagcctgcggcttcgctgggtgcccctgccggattctcagtacaacgggaaccccgagtccgtgggctacaggattaagtactggcgctcagacctccagtcctcagcagtggcccaagtcgtcagtgaccggctggagagagaattcaccatcgaggagctggaggagtggatggaatacgagctgcagatgcaggccttcaacgccgtcggggctgggccgtggagcgaggtggtgcggggccggacgcgggagtcagttccttcagccgcccctgagaacgtgtcagccgaggctgtcagctcgacccagattttactgacatggacatccgtgccggaacaggaccagaatgggctcatactgggctacaagatcctgttccgggccaaagacctggatcccgagcccaggagccacatcgtgcgagggaaccacacgcagtcggccctgctggcaggcctgcgcaagttcgtgctctacgagctccaggtgctggcgttcacccgcatcgggaacggggtccccagcacgcccctcatcctggagcgcaccaaagacgatgccccaggcccaccagtgaggctcgtgttccccgaagtgagactcacctcygtgcggatagtgtggcaacctccggaggagcccaacggcatcatcctggggtaccagattgcctaccgcctggccagcagcagcccccacaccttcaccaccgtggaggtcggcgccacagtgaggcagttcacagccaccgacctggccccggagtccgcatacatcttcaggctgtccgccaagacgaggcagggctggggggagccactggaggccaccgtcatcaccaccgagaagagagagcggccggcaccccccagagagctcctggtgccccaggcagaagtgaccgcacgcagcctccggctccagtgggtcccgggcagcgacggggcctcccccatccggtacttcaccatgcaggtgcgagagctgcctcggggtgagtggcagacctactcctcgtccatcagccatgaggccacagcatgcgtcgttgacagactgaggcccttcacctcctacaagctgcgcctgaaagccaccaacgacattggggacagtgacttcagttcagagacagaggcggtgaccacgctgcaggatgttccaggagagcccccgggatctgtctcagcgacgccacacaccacgtcctctgtcctgatacagtggcagcctccgagggacgaaagcctgaayggccttcttcagggatacaggatctactacagggagctggagtatgaagccgggtcaggcacygaggccaagacgctcaaaaaccctatagctttacrtgctgagctcacagcccaaagcagcttcaagacggtgaacagcagctccacatcgacgatgtgtgaactaacacatttaaagaagtaccggcgctatgaagtaataatgaccgcctataacatcatcggcgagagcccagccagcgcgcccgtggaggtctttgtcggcgaggctgccccggccatggccccgcagaacgtgcaggtgaccccactcacggccagccagctggaggtcacgtgggacccaccacccccggagagccagaatgggaacatccaaggctacaagatttactactgggaggcagacagccagaacgaaacggagaaaatgaaggtcctcttcctccccgagcccgtggtgaggctgaagaacctgaccagccataccaagtacctggtcagcatatcagccttcaacgccgccggagatggacctaagagtgacccccagcaggggcgcacccaccaggccgcccctggggcccccagctttctggcgttctcagaaataacctccaccacgctcaacgtgtcctggggcgagcctgcggcggccaacggcatcctgcagggctatcgggtggtgtacgagcccttggcccctgtacaaggggtgagcaaggtggtgaccgtggaagtgagagggaactggcagcgctggctgaaggtgcgggacctcaccaagggagtgacctatttcttccgtgtccaagcgcggaccatcacctacgggcccgagctccaagccaatatcacagccgggccagccgagggatccccgggctcgcctagagatgtcctggtcaccaagtccgcctctgaactgacgctgcagtggactgagggacactctggcgacacacctaccacgggctatgtgatcgaggcccggccctcagatgaaggcttatgggacatgtttgtgaaggacatcccgcggagcgccacatcctacaccctcagcctggataagctccggcaaggagtgacttacgagttccgggtggtggctgtgaatgaggcgggctacggggagcccagcaacccctccacggctgtgtcagctcaagtggaagccccattctacgaggagtggtggttcctcctggtgatggctctgtccagcctgatcgtcatcctgctggtggtgttcgccctcgtcctgcacgggcagaataagaagtataagaactgcagcacaggaaaggggatctccaccatggaggagtctgtgaccctggacaacggaggatttgctgccctggagctcagcagccgccacctcaatgtcaagagcaccttctccaagaagaacgggaccaggtccccaccccggcctagccccggcggcctgcactactcagacgaggacatctgcaacaagtacaacggcgccgtgctgaccgagagcgtgagcctcaaggagaagtcggcagatgcatcagaatctgaggccacggactctgactacgaggacgcgctgcccaagcactccttcgtgaaccactacatgagcgaccccacctactacaactcatggaagcgcagggcccagggccgcgcacctgcgccgcacaggtacgaggcggtggcgggctccgaggcgggcgcgcagctgcacccggtcatcaccacgcagagcgcgggcggcgtctacacccccgctggccccggcgcgcgaactccgctcaccggcttctcctccttcgtgtgagcaaagcgccgcgcctccctcagggcggaacggaggcaactttccggagtctatttttgttaagacaatcaactccaataactgagctgaagtttttgtttaaaaagaaaaaaatctgataagtgatgattttacctacttgtggacactagatttcaattaggaaggtttttttaaacggctttttgtaacttcgctgcaggaagcaggtttgtttc

SEQ ID NO: 447 - DNA, 11537 bp, Homo sapiens
caggcaccttttttgatccagtcaaggaagaggatttgttgttttcgaaatcagagtgaaggaagcaccgaagcgaaacttaaggaatcctgccttcccggagccgcgggcgatgcgactagggctgccgggcgccgccgccgcccgtccggcttcgtccttcccggcagtcgggaactagttctgaccctcgccccccgaccccggatcgaatccccgccctccgcaccctggatatgttttctcccagacctggatatttttttgatatcgtgaaactacgagggaaataatttgggggatttcttcttggctccctgctttccccacagacatgccttccgtttggagggccgcggcaccccgtccgaggcgaaggaacccccccagccgcgagggagagaaatgaagggaatttctgcagcggcatgaaagctctgcagctaggtcctctcatcagccatttgtcctttcaaactgtattgtgatacgggcaggatcagtccacgggagagaagacgagcctcccggctgtttctccgccggtctacttcccatatttcttttctttgccctcctgattcttggctggcccagggatgacttcctcgctgcagcggccctggcgggtgccctggctaccatggaccatcctgctggtcagcactgcggctgcttcgcagaatcaagaacggctatgtgcgtttaaagatccgtatcagcaagaccttgggataggtgagagtagaatctctcatgaaaatgggacaatattatgctcgaaaggtagcacctgctatggcctttgggagaaatcaaaaggggacataaatcttgtaaaacaaggatgttggtctcacattggagatccccaagagtgtcactatgaagaatgtgtagtaactaccactcctccctcaattcagaatggaacataccgtttctgctgttgtagcacagatttatgtaatgtcaactttactgagaattttccacctcctgacacaacaccactcagtccacctcattcatttaaccgagatgagacaataatcattgctttggcatcagtctctgtattagctgttttgatagttgccttatgctttggatacagaatgttgacaggagaccgtaaacaaggtcttcacagtatgaacatgatggaggcagcagcatccgaaccctctcttgatctagataatctgaaactgttggagctgattggccgaggtcgatatggagcagtatataaaggctccttggatgagcgtccagttgctgtaaaagtgttttcctttgcaaaccgtcagaattttatcaacgaaaagaacatttacagagtgcctttgatggaacatgacaacattgcccgctttatagttggagatgagagagtcactgcagatggacgcatggaatatttgcttgtgatggagtactatcccaatggatctttatgcaagtatttaagtctccacacaagtgactgggtaagctcttgccgtcttgctcattctgttactagaggactggcttatcttcacacagaattaccacgaggagatcattataaacctgcaatttcccatcgagatttaaacagcagaaatgtcctagtgaaaaatgatggaacctgtgttattagtgactttggactgtccatgaggctgactggaaatagactggtgcgcccaggggaggaagataatgcagccataagcgaggttggcactatcagatatatggcaccagaagtgctagaaggagctgtgaacttgagggactgtgaatcagctttgaaacaagtagacatgtatgctcttggactaatctattgggagatatttatgagatgtacagacctcttcccaggggaatccgtaccagagtaccagatggcttttcagacagaggttggaaaccatcccacttttgaggatatgcaggttctcgtgtctagggaaaaacagagacccaagttcccagaagcctggaaagaaaatagcctggcagtgaggtcactcaaggagacaatcgaagactgttgggaccaggatgcagaggctcggcttactgcacagtgtgctgaggaaaggatggctgaacttatgatgatttgggaaagaaacaaatctgtgagcccaacagtcaatccaatgtctactgctatgcagaatgaacgcaacctgtcacataataggcgtgtgccaaaaattggtccttatccagattattcttcctcctcatacattgaagactctatccatcatactgacagcatcgtgaagaatatttcctctgagcattctatgtccagcacacctttgactataggggaaaaaaaccgaaattcaattaactatgaacgacagcaagcacaagctcgaatccccagccctgaaacaagtgtcaccagcctctccaccaacacaacaaccacaaacaccacaggactcacgccaagtactggcatgactactatatctgagatgccatacccagatgaaacaaatctgcataccacaaatgttgcacagtcaattgggccaacccctgtctgcttacagctgacagaagaagacttggaaaccaacaagctagacccaaaagaagttgataagaacctcaaggaaagctctgatgagaatctcatggagcactctcttaaacagttcagtggcccagacccactgagcagtactagttctagcttgctttacccactcataaaacttgcagtagaagcaactggacagcaggacttcacacagactgcaaatggccaagcatgtttgattcctgatgttctgcctactcagatctatcctctccccaagcagcagaaccttcccaagagacctactagtttgcctttgaacaccaaaaattcaacaaaagagccccggctaaaatttggcagcaagcacaaatcaaacttgaaacaagtcgaaactggagttgccaagatgaatacaatcaatgcagcagaacctcatgtggtgacagtcaccatgaatggtgtggcaggtagaaaccacagtgttaactcccatgctgccacaacccaatatgccaatgggacagtactatctggccaaacaaccaacatagtgacacatagggcccaagaaatgttgcagaatcagtttattggtgaggacacccggctgaatattaattccagtcctgatgagcatgagcctttactgagacgagagcaacaagctggccatgatgaaggtgttctggatcgtcttgtggacaggagggaacggccactagaaggtggccgaactaattccaataacaacaacagcaatccatgttcagaacaagatgttcttgcacagggtgttccaagcacagcagcagatcctgggccatcaaagcccagaagagcacagaggcctaattctctggatctttcagccacaaatgtcctggatggcagcagtatacagataggtgagtcaacacaagatggcaaatcaggatcaggtgaaaagatcaagaaacgtgtgaaaactccctattctcttaagcggtggcgcccctccacctgggtcatctccactgaatcgctggactgtgaagtcaacaataatggcagtaacagggcagttcattccaaatccagcactgctgtttaccttgcagaaggaggcactgctacaaccatggtgtctaaagatataggaatgaactgtctgtgaaatgttttcaagcctatggagtgaaattattttttgcatcatttaaacatgcagaagatgtttaaaaataaaaaaaaaactgctttatcctcctgtcagcaccccctcccacccctgcaacaaagacttgctttaaatagatttcagctatgcagaaaaatttagcttatgcttccatatttttaaattttgttttttaagttttgcacttttgtttagtctcgctaaagttatatttgtctgttatgaccacagagttatatgtgtgtgtatcaaaagtggtctcaaaatatttttttaagaaaaaaagcaaaaacaatgtattgctgataatcagtttggaccagtttcttaaggtcattaaaacagaagcaaattaagacaggtttgactgcagtggtgtctggtatccatgttttatttctgggcacaagctagtttttatgttgatacgttcctgaacatattatcttgttggacatcttttctcttgtgttttgtttgaatgtgcaatagtttataggccacaaataagctttcttgtaagctctcttcctaacagggcacatattcttccataatataaacacttttctgccccatctcccatacttttgaaggtcagttctatgacagtgaattttgcacaggagaagcagctacctgatttcttactttctctctccttatcatggagaatacagaaacattgtctgaaagggctctaaagaaggaactaccaaaacctgacttgaaatgccatttcttttaaccttccaaatcctaaatgtttccttcaaggcatcttaataaacttatttgcttctggttttgggagttcataagagagaatagaacaaaatacaggacatcaaatattagccatttcccattttattttatttttctatgtaggttcatgttccatgttcatttatttaagaaatacatttttattggtaagcttatagagctacacttatggaatttttaagtaggtaaataaatggttaagacaaaatagtgttatagccttcattctctgaataggccatctttgactcataaaattacccttactgtttattataacttcagaagtaatttatagttctgaacctatagtatcttttaccctgttcccaagcaaagactggtgactttatctgaaaatgattcctcttcccatgacctaaaacactgtgaggaaaaatcattcaagtggcatgccaagtccctatgaaggaagggctgctatcaaacctaccttttttgagcaaactgagactaaacttctctcttttcaaaattgtgttatcttccttaatcctattttcataatttttccttttgccagtttttcacattatctttgatatgtgagcaacatttattatttacattagagtataccttttagtaataaaatgacttgaaatcatattatttttaaaagccctttgcttctttcattacttataatctcctctaaaacaacctctgcatgttttttttaaataaagcactttctgtcaaataatggacttttttctaaacagaaattattttctattaatttgcaaactgatgatttcacttttttttacttttttttcgattatcagagtacttagtaaatgttatatagtttagttctaagatagttccagggattaaaaggttaagaggaaaacacaaatcaccaaatttctgatttatgtttttatctcctgaacaatattttctcactcatattcctctatcttatcacttagctaaagacagcctaaatttcccaattttctgtccaaaatatttgtgatttacttgtatataagccttctcatttgccatgtgctgtgatcttacaagttagatgttactatacctaccatttattcagctggattgctgaacacagttctggattcatagaattaagaatatcttgttagtgcccaggatttccacgttttgtgttttattggcccttttctttattcagccccttaatctattttcagtcttctggcacgtaatttttttcacagttattattcttctattaacaaattatttttatctttcctagtacattttcacttagttctcttgcccttaaatatctttcacatgcattttaggatattcttttcaaatatttgtaggacaactttgaatcaaaataaattatgttccttctccaatttgaagcattgaggataaatgaccatttgaggtctaactgatcttttcctgccagaagagttatcttacgttctgctatatttgtatttgggccagttgattgtaggttgtccaacattttttaatattgggaaaattatgataaaatgctttaaaaattaatatgccagattaaaataactgaatagtttactatttcattcaagcatgtttaaaacaaataatttcctttcaccagtttttcttagtaaactcctgaaaaagtaggaaaggtggaaagtatatatcatttttataaattttaaattgtacatcagacttttaaaatctgtaatatacaagcaagcaaaattattttaaatgacttaattgtatgctaatactcatctgataataaatgcttcttaaagttgacatttaactgctatcacaaagttttatatgtagaaaagtggggtccttttgaataaaagatcattcaactaaaaatattaaaatttatttcactggatggtaatgtaaccttaaaagcatcataataggtaaagtctaatattagttcccttaacaaaatcctaactgtataccagaattaggtcactgaaagaacttgatttgaattacgtttagacaaaaatgatttaattgtaaattcttaaaactttctaaatgcataattggcaaaaaaaaaaacccactgttaccagtgtaggaagttacaagaaggcacatactgaatgctgaagtatacatatgctatttctcttaaacctcagagcaaccatatgagcattgtaattaatattcccattttacagatgaggaaactgaagctaagagaagctaagtaatatgcccaaggtccacatctagtaacagacaaagctgggatttcagtctatgtctgcctctctccacatctctttcatccataccacactgcctacatgccatatgacaggatgtgtaatgggctaacgtttatttaaaaagttcaggccaggtgcagtggcttatgcctataatccccgcactttgggaggccgagccgggtggatcatgaggtcagacgttcaacaccagcctggccaagatggtgaaaccccgtctctattaaaaatattttttaaaaattaactgagcgtggtggtgggcgcctgtagtcccagctactcaggaggctaaggcaggagaatctcttgaacccgagaggtggaggttgcagtgagctgagatcgcgccactgcactgcagcctaggcgacagagcaagactgcctcaaaaaaaaaacataaaaattcagtcactatactctggcacaattttcatttgtatatgagccaaaccacataccttaatgatttgggaagttaggcaaatatgagatatgtagacatatctatgctgattgttgcttgagaaataattactaattctagacaaaactcaatcctgtatcttccatcatgaatcttaaaatcatttcacttcactcctaacatttcttacattgcagaactaatggtaaagtaaattttacggaaaaagttaagatagctttgggaacagagacctttccctaaattgattccatagcagatttgggggaattaacaaagaatttcagtctcatcaatcctttgaatccatcttcaaaacttctgcttttaataactttagaaaatttactaatctatagaactaattgagtaggatataggaaggatacaaggatataatgtcctttttataaaagtttagtatagcttctttacatgtatccacttgttccagaaaatgtgcattggttctgaatgtgaaaatatttaaagagagaaaggaacactcaagtaagtgtgggcttcagtgggaattatcacaaaacattggcaagtatttttatttaaattattttcaaatttgacttctacagccaagtggaattggtaggctgtagctgttacactgaaatttctagtctttgtaagtgcctcctgaaagtcatttaaaatggaaaaatatttcaatgagcttttccttttttcatatttatggacatgaatattttattggagatcattaactcctagaatttgagattatatttccatacaacattttataaagttatgttgaacttactacctgttatgtgcaggttattatgtaactattcacagattgcttcatatattgctttatcttcccatctaacttcttaaagttaaaatccggacacacatgttgattatctagaccagtcattctggaaattgtaacactcccacataaaccccaggagactttttcagaatgcaatgtttctaaatgtactgttactggcagtttactctccagcatataaggttgcattttaacttttagattatgaactgtgcaaactttacccaaaactatcttgcatgattccctcctaaatatattccttgattaagtaaatctggcaaatcactgtttgagctagttacataaaatttgttatcaagagaaggcttttctacaagtttccagattaacataaagaaaagagggaatcacagggcatttaagtgcaccttcccattactttccttaaatcacctcatagttaggctgggcgcggtggctcacgcctgtaatcccagcactttgggaggccgagacggtggatcacgaggtcaggggactgagatcatcctggctaacacgatgaaacctcatctctactaaaaatacaaataattagccaggcatggtggcacgcgcctgtagtcccagctactcgggaggcagagacaggagaatcgtttgcacccgggaggcggaggttgttgcagtgagccgagatcgcgccaatgcactccagcctgggctacagagtgagactccatctcaaaaaaaaacaaaaaaaatcacctcatagtttatgtctgacttactccaaacctcagttatctgatttgtagtctgtgtcaggaaagttttcttcatatctattctgtctccctcctctttgattttaaatttttttcttttacccagtaggacaaaaaagagcagttggtcatcatccccaatattcttagtcttcagtatgcttcaggcctctcaatgaacacttaagtctcaattcttcagacaaaattgcttaagctcttctcctcagtcctattttaatgactttatatttaagaatatagaattatattttcttttatattcaaattcattactccagttaagtaatagtttgatagtttgatagaatcgagagttaagatgtttctatttgaaagtggattcaaccatcagaccaccagcaaatcggcacttaatttttgtgttatctaacattttctattgtggaattttatgattttatattctcattagttataactaaaaagccatgcacacagaattgtatatcattttgccattaaaattttttaacatattgcagcaagcttagttttatgattgagccacaaccttttacatattttttgtatgaaatattaaacactaaatgcaagattaactttcaaaagcaaaccctacattaatcaggtattatctatggacatttttgtagaccacttttgaaatacttattattttgcaacatagactggactatacaactttcatttaacttttaggtgactgatttaagttgagtgtgcatatagagaaaaacctagaaatttatctcatggcagatacatttgaaagtacttcagaagaatttatgctgtatattaaaactaggctcaaaataaatctatcgtatctttaaaagtccaattctgttattactgtgatgtttgtagtgttactattaaacattgtgaacatacacatttttaaaacaacttgaaacccattttaaaatctgggtaagagagaaggaatcttcagaacaaaatcacatcattagggtgtccagtttatgattgaatttttaagcaaattactgtatttgaaactacaacttgatttggttttcagttttaaaaggcaacatgtgggttttatccattttatttatacctttagatttcagaaacatcttcatgttttagatgcattctacagacatcatgttacttaaaaactcagggcccctttcatccctttgtacactgaaaaagttcaattgttagcaagtaagcaattagatccagttgaatatttaaagtgtttgttgcacagttcatttaatgtttcatcttatttgactttttcacatagatataatatcagatttcattaattataaaaagttgcccagttctgtaattactgaacagagggaatgactcaactaattggctacatgttgcaacaaatttaggcctttagagttgaagcactgacttaaaacgacttacatttctgttctttggtcaaatgaccatacatgatatgggacaaattgtttcattttgtttgttttttaataagggaacttggtaaagtagttcctgtcagataggattttctcaagagacaatttaacgttataaagccttctaaaagtgaactaaatattttataactttagtaatagcttggatggttttgagaaaataacctgtatttatcacattgtcaaacagaatttttctttgaatcagacaagttcaagctctaaattgatgtgctatatacttaaaatcctaggaagttatctgtaaccagtctcttgtctcaggctcttcaccttgttaccaatcctcgtaagtatgtaaaggaaacatatttttaaagaagcttaacagtaagaaaaaattactaaaagatgcaattcaaagataggtcccagtttaacactgaattgcttgacttctgtggcttttctttttctggccacatttatttatttaagcaatttttgtatgccttgttatttcatttccatagagattatattgtatcagtgtttatgtaagctggaatcatcctcagttttttgctgataatttttcaaataaagatacatggataattgtaaaatacactaactcttagggtgttgtagtagctgaaacatggagatgcgtagctgtcatgctttttctgaatggacaggagaaacataagctacggagtattcacttctgaggatgcttttccggaaaaagaaaggctagaaaatactcgcacttcctcagaaccctctttcttgttaacgggtatcttttgttggtgtgttttgctcttacattacagatagactatcatatatgactttatgaataatttcagttattttgcttttgtataagctgtctgaagccttgctatgctgtataagttgtgtttgatggatcagtgtgagtataaaataaagcaaatcacttttcttttgtattatctatggatgccactatgaaagctgacattaagccactaaagagttttctatgaataagtgtaagtaaatgctttgatatatataaacctaaataaaaagattgtattgatacagagacattggagaaggagattttaaggcagttctttaggtttaaaaaggcttgctgtaaaatggtgcgttattccgtttattaaagatcatattaatgacaataaaaaaaaaaaaaaaaa

SEQ ID NO: 448 - DNA, 1454 bp, Homo sapiens
ggtaaggtgtagctgttctgtcccagtccccgtagctctgcaccgagcagaagaggtctagggtcacgcaggggccatggctgaggcacttgggcttggttctggcaggcggagcggacggggctgagagcggggccctacgggcggaagaggagcactggaagaaggaagagacaaatgttggggtctacggattcagttccagtttaatgatgtggccctctaaggagataattttgccttaaacagaaagacttgaccctcttaggtgtcatacctaagatcagtgtgttttttgtgtccaattcttttatcaccaaaaaagagaagaaatattgcagtgaatgaagattcctctgcattttagcactgctttttcaactgtagttggcttttgaatgaggatgacaatggaagagatgaagaatgaagctgagaccacatccatggtttctatgcccctctatgcagtcatgtatcctgtgtttaatgagctagaacgagtaaatctgtctgcagcccagacactgagagccgctttcatcaaggctgaaaaagaaaatccaggtctcacacaagacatcattatgaaaattttagagaaaaaaagcgtggaagttaacttcacggagtcccttcttcgtatggcagctgatgatgtagaagagtatatgattgaacgaccagagccagaattccaagacctaaacgaaaaggcacgagcacttaaacaaattctcagtaagatcccagatgagatcaatgacagagtgaggtttctgcagacaatcaaggatatagctagtgcaataaaagaacttcttgatacagtgaataatgtcttcaagaaatatcaataccagaaccgcagggcacttgaacaccaaaagaaagaatttgtaaagtactccaaaagtttcagtgatactctgaaaacgtattttaaagatggcaaggcaataaatgtgttcgtaagtgccaaccgactaattcatcaaaccaacttaatacttcagaccttcaaaactgtggcctgaaagttgtatatgttaagagatgtacttctcagtggcagtattgaactgcctttatctgtaaattttaaagtttgactgtataaattatcagtccctcctgaagggatctaatccaggatgttgaatgggattattgccatcttacaccatatttttgtaaaatgtagcttaatcataatctcacactgaagattttgcatcacttttgctattatcattcttttaagaattataagccaaaagaatttacgccttaatgtgtcattatataacattccttaaaagaattgtaaatattggtgtttgtttctgacattttaacttgaaagcgatatgctgcaagataatgtatttaacaatatttggtggcaaatattcaataaatagtttacatctgttaaaaaaaaaaaaaaaaaa

SEQ ID NO: 449 - DNA, 1398 bp, Homo sapiens
agcggaggggcgccctaacgaacccgggatacggtctgttcctagtccgctccggaaatgcaactgcgtacgggctggccgcgtaatcgtgacgacagcgcgccagcgccggctagccggacgccctaggcttccgcgagatcttcggtgggggtacgggtgttttacgccaggacgctgatgcgtttgggttctcgtctgcagaccctctggacctggtcacgattccataatgtaccacaacagtagtcagaagcggcactggaccttctccagcgaggagcagctggcaagactgcgggctgacgccaaccgcaaattcagatgcaaagccgtggccaacgggaaggttcttccgaatgatccagtctttcttgagcctcatgaagaaatgacactctgcaaatactatgagaaaaggttattggaattctgttcggtgtttaagccagcaatgccaagatctgttgtgggtacggcttgtatgtatttcaaacgtttttatcttaataactcagtaatggaatatcaccccaggataataatgctcacttgtgcatttttggcctgcaaagtagatgaattcaatgtatctagtcctcagtttgttggaaacctccgggagagtcctcttggacaggagaaggcacttgaacagatactggaatatgaactacttcttatacagcaacttaatttccaccttattgtccacaatccttacagaccatttgagggcttcctcatcgacttaaagacccgctatcccatattggagaatccagagattttgaggaaaacagctgatgactttcttaatagaattgcattgacggatgcttaccttttatacacaccttcccaaattgccctgactgccattttatctagtgcctccagggctggaattactatggaaagttatttatcagagagtctgatgctgaaagagaacagaacttgcctgtcacagttactagatataatgaaaagcatgagaaacttagtaaagaagtatgaaccacccagatctgaagaagttgctgttctgaaacagaagttggagcgatgtcattctgctgagcttgcacttaacgtaatcacgaagaagaggaaaggctatgaagatgatgattacgtctcaaagaaatccaaacatgaggaggaagaatggactgatgacgacctggtagaatctctctaaccatttgaagttgatttctcaatgctaactaatcaagagaagtaggaagcatatcaaacgtttaactttatttaaaaagtataatgtgaaaacataaaatatattaaaacttttctattgttttctttccctttcacagtaactttatgtaaaataaaccatcttcaaaagagctagaataaaaaaaaaaaaaa

SEQ ID NO: 450 - DNA, 2937 bp, Homo sapiens
gctggggaacactgttatcgccccgccccctcggagctttttctccagttaactgtcggagtagcgggggctccggcgccgggcgacatgccggtgcgcttcaaggggctgagtgaataccagaggaacttcctgtggaaaaagtcttatttgtcagagtcttgtaattcctccgtggggcgaaagtacccatgggctggacttagatcagatcaattaggcatcacgaaagagccaagttttatttcaaaaagaagagtcccttaccatgacccacagatttcaaaatctctggagtggaatggagctatctcagagagcaatgtggttgcatcaccagaaccagaagccccggaaacaccaaaatcacaagaagcagaacaaaaggatgttattcaagaaagagttcactcactagaagcttccagggttcccaaaagaaccagatctcactctgcagactccagagctgaaggggcttcagatgtggaaaataatgagggtgtaacaaaccatacaccagttaatgaaaatgtggaactggaacattctaccaaggttctttcagaaaatgtagataatgggttggatagacttctgcgtaagaaagctggattgactgttgttccttcatataatgccttgagaaattctgaatatcaaaggcagtttgtttggaagacttctaaagaaactgctccagcttttgcagccaatcaggttttccacaataaaagccagtttgttccaccattcaaaggtaactcagtcatccatgaaactgaatacaaaagaaatttcaagggtttatctccagtgaaagaaccaaaattaagaaatgatttgagagaaaacagaaatcttgaaacagtgtctcctgaaaggaagagtaataaaatagacgatcgtttaaaattggaagcagagatggaattaaaagacttacaccagcctaaaaggaagcttactccttggaaacatcaaaggcttgggaaggtgaattccgaatatagagcaaaatttctgagcccagctcagtatttatataaagctggggcttggacacatgtaaagggaaacatgccaaatcaggttaaagaactccgagaaaaggctgagttttataggaagcgagttcaggggacgcatttttctcgggaccatctgaatcagattttatctgatagcaactgctgttgggatgtctcctcaaccacaagctcagaaggaaccgttagtagcaacatcagagcattagatcttgctggagatcctacaagccataagactttgcagaaatgtccttctacagaaccagaagaaaaaggaaatatcgtggaagaacagccccagaaaaataccacggagaaattgggtgtgtcagctcccaccatacccgttagaaggcggctggcttgggatacagagaacacaagtgaagacgtacagaaacagcccggggagaaagaggaggaggacgacaatgaagaggaaggggacaggaaaacgggcaagcaggcttttatgggagagcaagagaagttggatgtacatgagaaatctaaggcagataagatgaaagaagggtcagattcttctgtatcctcagaaaaaggaggccggcttcctactcccaagctgagagaacttggtggaatccagaggactcatcatgatctcactactccagctgttggtggtgctgttttagtgtctccatctaagatgaagcctccagccctagaacagaggaaaagaatgacctctcaggattgtttagaaacttcaaagaatgattttactaagaaagaaagtcgtgctgtatccctactgacttctccagctgctggtataaaaacagttgatcctctgcctttgcgggaagattctgaagacaatatccacaaatttgctgaggcaactcttccagtttcaaaaattccaaaatacccaacaaatccccctggacagttgccttctccaccacatgttccatcctactggcatccctctcgacgaattcagggctctcttagagatccagagtttcagcacaatgtgggaaaagcaaggatgaacaatttgcagttacctcaacatgaagcctttaatgatgaagatgaggacagattgtctgagatttctgctcgctctgcagcttctagtctccgggcttttcaaactctggcacgagctaagaaaaggaaggagaatttctggggtaaaacataaacctagctgagttgcctttatctaaggaaacattggcataatttttctttattgcttactgtgttaaaattttttgagtgaagtttttcctaacgttttctactttgaaatatttaatttccaatagaacagtttacttggaaattgttaacataggcttatacaaatttaacttttaaagaattctttttacatctatcccagagtacaaagacctagattattgaattcttcacatgtaactttcgtaataggtgtcatggatagattttcacctatccagagagtattctaaaaaaataaacaaagtgaagtaaaagttaagatcccagtgtgaagtatatattcccctaagatttgatatatgtatctttataattgatgatgttgtaaaatgaatttgttgttcctttaacctttgctgtagtgtttctttttattttagttccttctatacatgtttgcagtgttaagataattgtactttgaaaacaccagctgtatatatttttcttatttatgtaacaaagtttgctgaaagatatgtatatttttgatctttgagtgtattctatttgtgtaaggactttggcttacatttgaataatgtctagattttgaaaaattacctgtataatggagaattaaaactttgtagacattttgaaataaaaatggatcaagtgcggaaaaaaaaaaaaaaaa

SEQ ID NO: 451 - DNA, 2382 bp, Homo sapiens
agtaccgctgcggccgggggattgggccggggtctccaccgccgaccgaggggagcggcgtccgctcggccctgctttttgcgacctgccgtcagccccacgtcgccggcctggaggggcgaagaggacgaggggcgcaaggcttcctccggggacattggctccctggattatcaagcagtttgtagttgacattgaatccaggctgaggatggaaggtgtggaacttaaagaagaatggcaagatgaagattttccgatacctttaccagaagatgatagtattgaagcagatatactagctataactggaccagaggaccagcctggctcactagaagttaatggaaataaagtgagaaagaaactaatggctccagacattagcctgacactggatcctagtgatggctctgtattgtcagatgatttggatgaaagtggggagattgacttagatggcttagacacaccgtcagagaatagtaatgagtttgagtgggaagatgatcttccaaaacccaagactactgaagtaattaggaaaggctcaattactgaatacacagcagcagaggaaaaagaagatggacgacgctggcgtatgttcaggattggagaacaggaccacagggttgatatgaaggcaattgaaccctataaaaaagttatcagccatgggggatattatggggatggattaaatgccattgttgtatttgctgtctgtttcatgcctgaaagtagtcagcctaactatagatacctgatggacaatctttttaaatatgttattggcactttggagctattagtagcagaaaactacatgatagtttatttaaatggtgcaacaactcgaagaaaaatgcccagtctgggatggctcaggaaatgttatcagcaaattgatagaaggttacggaaaaatctaaaatccctaatcattgtacatccttcttggtttatcagaacacttctggctgttacaagaccatttattagctcgaaattcagccaaaaaattagatacgtgtttaatttggcagaactagcagaacttgtccccatggaatacgttggcataccagaatgcataaaacaagttgatcaagaacttaatggaaaacaagatgaaccgaaaaatgaacagtaagtttggcatctagtccaaacaagactgaagaatgtgctgatggagcagtgctgtttctgcattcataatgcatttattggcccatatttttatgtaacctgttacaaaatagacttgactttttcataatggacttttgtattatacaagggactgttcactgctgtactggtttgcaaatttcttgaatttagctctttaatagctaactgtattattatcgttttatattttatattgctaaatagagaaccacactttatataaagtagtttttgcatttgtttattgaatgatgcatcttcttcggtgaaatatttatatgcataaatggcaaaggaaagaaataatatatatttttatgtcattgagcaatattttttcaatgtgtacctgtcttatggaagaaatatgcaggtatataagaccacgattttctaagctgccatataagaatttttgtttttgtaaatggttaaatacatttcctgggtaacttaggaaattaagctttttcataaggcaacagatggtaaactgattgtcatgaatacccaaagatcatgtatataatcgaagtgtattagtaccatcccaaggtttttttctcatttaacatatttgtttcataattcagcaagtacagatgcaagcgcattgcacactttttcctttctaaacttaaagacaagtcaaaaagccattcttagaactagaggatttaagcagggtcggaattacgggtttgtatatatgtatatactcgtttgtatatatgtatatactgggacattttatcttctggcccaaagtcagaactttataaaaatcttgagtttgttcacttaatgtgaaataagctatgtgtccagggtattgctcccctgagtgtatatgagtgctgagtagtattgcagagaatgtgatgagttatcactgtcacaactttttctatagaaaacaggggctgcttttaaactctcactatgggacactttaccaaaatacttccatatcaattatttgaacccggtagtttgtttgacctagttagattgtggtgtttattcaagtttgaaatcatgtttgacaatactgtaaattaggttaattttgaagtcttagcatcatcatattgtgctgttttggataacacgtttgttcaagaacatttaaactgtttctttggtgtcctttacattgaaataaattgtgtttgtgcctcc

SEQ ID NO: 452 - DNA, 3016 bp, Homo sapiens
gccgaaggcccgagcgcccgaggcgtctgggatggtgtgggaccggcaaaccaagatggagtatgagtggaaacctgacgagcaagggcttcagcaaatcctgcagctgttgaaggagtcccagtccccagacaccaccatccagagaaccgtgcaacaaaaactggaacaacttaatcagtatccagactttaacaactacttgatttttgttcttacaaaattaaaatctgaagatgaacccacaagatcattgagtggtcttatcttgaagaataatgtgaaagcacactttcagaacttcccaaatggtgtaacagactttattaaaagtgaatgtttaaataatattggtgactcctctcctctgattagagccactgttggtattttgatcacaactatagcctccaagggagaattgcagaattggcctgacctcttaccaaaactctgtagcctgttggattctgaagattataatacctgtgagggagcatttggtgcccttcagaagatttgtgaagattctgctgagattttagacagtgatgttttagatcgtcctctcaacatcatgattcccaaatttttacagttcttcaagcatagtagtccaaaaataaggtctcacgctgttgcatgtgtcaatcagtttatcatcagtaggactcaagctctaatgttgcacattgattcttttattgagaatctctttgcattagctggtgatgaagaaccagaggtacggaaaaatgtgtgccgagcacttgtgatgttgctcgaagttcgaatggatcgcctgcttcctcacatgcataatatagttgagtacatgctacagaggactcaagatcaagatgaaaatgtggctttagaagcctgtgaattttggctaactttagctgaacagccaatatgcaaagatgtactcgtaaggcatcttcctaagttgattcctgtgttagtgaatggcatgaagtactcagacatagatattatcctacttaagggtgatgttgaagaagacgaaacgattcctgatagtgaacaggatatacggccacgttttcaccgatcgaggacggtggctcagcagcatgatgaagatggaattgaagaggaagatgatgatgatgatgaaattgatgatgatgatacaatttctgactggaatctaagaaaatgttctgctgctgccctggatgttcttgcaaatgtgtatcgtgatgaactgctgccacatattttgccccttttgaaagaattactttttcatcatgaatgggttgttaaagaatcaggcattttggttttaggagcaattgctgaaggttgcatgcagggcatgattccatacttgcctgagcttattcctcaccttattcagtgcctctctgataaaaaggctcttgtgcgttccataacatgctggactcttagccgctatgcacactgggtggtcagccagccgccagacacgtacctgaagccattaatgacagaattgctaaagcgcatcctggatagcaacaagagagtacaagaagctgcctgcagtgcctttgctaccctagaagaggaggcttgtacagaacttgttccttaccttgcttatatacttgataccctggtctttgcatttagtaaataccagcataagaacctgctcattctttacgatgccataggaacattagcagattcagtaggacatcatttaaacaaaccagaatatattcagatgctaatgcctccactgatccagaaatggaacatgttaaaggatgaagataaagatctcttccctttacttgagtgcctatcttcagttgccacagcactgcagtctggattccttccgtactgtgaacctgtgtatcagcgttgtgtaaacctagtacagaagactcttgcacaagccatgctaaacaatgctcaaccagatcaatatgaagctccagataaagattttatgatagtggctcttgatttactgagtggcctggctgaaggacttggaggcaacattgaacagctggtagcccgaagtaacatcctgacactaatgtatcagtgcatgcaggataaaatgccagaagttcgacagagttcttttgccctgttaggtgacctcacaaaagcttgctttcagcatgttaagccttgtatagctgatttcatgccaatattgggaaccaacctaaatccagaattcatttcagtctgcaacaatgccacatgggcaattggagaaatctccattcaaatgggtatagagatgcagccttatattcctatggtgttgcaccagcttgtagaaatcattaacagacccaacacaccaaagacgttgttagagaatacagcaataacaattggtcgtcttggttacgtttgtcctcaagaggtggcccccatgctacagcagtttataagaccctggtgcacctctctgagaaacataagagacaatgaggaaaaggattcagcattccgtggaatttgtaccatgatcagtgtgaatcccagtggcgtaatccaagattttatatttttttgtgatgccgttgcatcatggattaacccaaaagatgatctcagagacatgttctgtaagatccttcatggatttaaaaatcaagttggcgatgaaaattggaggcgtttctctgaccagtttcctcttcccttaaaagagcgtcttgcagctttttatggtgtttaatctaatacacttaagctgcagtcccaaaattaggggtccttcagtcttggagactataagggagcctctgcacccagggaaaatgttaccctttacaggggggaagggtaaaccagtagggaatacagtacaatcccaaccctactgggaggggcgggagggaggtgttgccgtcactgtattaagtcgatgttgggaaacgttttaacatctggagcctttgtgggtggaaatatgtctccagttacaactccgcagtggatgtgaagaagcaaaaaaaaaaaaaaa

SEQ ID NO: 453 - DNA, 7368 bp, Homo sapiens
caagctttcaagcattcaaaggtctaaatgaaaaaggctaagtattatttcaaaaggcaagtatatcctaatatagcaaaacaaacaaagcaaaatccatcagctactcctccaattgaagtgatgaagcccaaataattcatatagcaaaatggagaaaattagaccggccatctaaaaatctgccattggtgaagtgatgaagaacatttactgtcttattccgaagcttgtcaattttgcaactcttggctgcctatggatttctgtggtgcagtgtacagttttaaatagctgcctaaagtcgtgtgtaactaatctgggccagcagcttgaccttggcacaccacataatctgagtgaaccgtgtatccaaggatgtcacttttggaactctgtagatcagaaaaactgtgctttaaagtgtcgggagtcgtgtgaggttggctgtagcagcgcggaaggtgcatatgaagaggaagtactggaaaatgcagacctaccaactgctccctttgcttcttccattggaagccacaatatgacattacgatggaaatctgcaaacttctctggagtaaaatacatcattcagtggaaatatgcacaacttctgggaagctggacttatactaagactgtgtccagaccgtcctatgtggtcaagcccctgcaccccttcactgagtacattttccgagtggtttggatcttcacagcgcagctgcagctctactcccctccaagtcccagttacaggactcatcctcatggagttcctgaaactgcacctttgattaggaatattgagagctcaagtcccgacactgtggaagtcagctgggatccacctcaattcccaggtggacctattttgggttataacttaaggctgatcagcaaaaatcaaaaattagatgcagggacacagagaaccagtttccagttttactccactttaccaaatactatctacaggttttctattgcagcagtaaatgaagttggtgagggtccagaagcagaatctagtattaccacttcatcttcagcagttcaacaagaggaacagtggctctttttatccagaaaaacttctctaagaaagagatctttaaaacatttagtagatgaagcacattgccttcggttggatgctatataccataatattacaggaatatctgttgatgtccaccagcaaattgtttatttctctgaaggaactctcatatgggcgaagaaggctgccaacatgtctgatgtatctgacctgagaattttttacagaggttcaggattaatttcttctatctccatagattggctttatcaaagaatgtatttcatcatggatgaactggtatgtgtctgtgatttagagaactgctcaaacatcgaggaaattactccaccctctattagtgcacctcaaaaaattgtggctgattcatacaatgggtatgtcttttacctcctgagagatggcatttatagagcagaccttcctgtaccatctggccggtgtgcagaagctgtgcgtattgtggagagttgcacgttaaaggactttgcaatcaagccacaagccaagcgaatcatttacttcaatgacactgcccaagtcttcatgtcaacatttctggatggctctgcttcccatctcatcctacctcgcatcccctttgctgatgtgaaaagttttgcttgtgaaaacaatgactttcttgtcacagatggcaaggtcattttccaacaggatgctttgtcttttaatgaattcatcgtgggatgtgacctgagtcacatagaagaatttgggtttggtaacttggtcatctttggctcatcctcccagctgcaccctctgccaggccgcccgcaggagctttcggtgctgtttggctctcaccaggctcttgttcaatggaagcctcctgcccttgccataggagccaatgtcatcctgatcagtgatattattgaactctttgaattaggcccttctgcctggcagaactggacctatgaggtgaaagtatccacccaagaccctcctgaagtcactcatattttcttgaacataagtggaaccatgctgaatgtacctgagctgcagagtgctatgaaatacaaggtttctgtgagagcaagttctccaaagaggccaggcccctggtcagagccctcagtgggtactaccctggtgccagctagtgaaccaccatttatcatggctgtgaaagaagatgggctttggagtaaaccattaaatagctttggcccaggagagttcttatcctctgatataggaaatgtgtcagacatggattggtataacaacagcctctactacagtgacacgaaaggcgacgtttttgtgtggctgctgaatgggacggatatctcagagaattatcacctacccagcattgcaggagcaggggctttagcttttgagtggctgggtcactttctctactgggctggaaagacatatgtgatacaaaggcagtctgtgttgacgggacacacagacattgttacccacgtgaagctattggtgaatgacatggtggtggattcagttggtggatatctctactggaccacactctattcagtggaaagcaccagactaaatggggaaagttcccttgtactacagacacagccttggttttctgggaaaaaggtaattgctctaactttagacctcagtgatgggctcctgtattggttggttcaagacagtcaatgtattcacctgtacacagctgttcttcggggacagagcactggggataccaccatcacagaatttgcagcctggagtacttctgaaatttcccagaatgcactgatgtactatagtggtcggctgttctggatcaatggctttaggattatcacaactcaagaaataggtcagaaaaccagtgtctctgttttggaaccagccagatttaatcagttcacaattattcagacatcccttaagcccctgccagggaacttttcctttacccctaaggttattccagattctgttcaagagtcttcatttaggattgaaggaaatgcttcaagttttcaaatcctgtggaatggtccccctgcggtagactggggtgtagttttctacagtgtagaatttagtgctcattctaagttcttggctagtgaacaacactctttacctgtatttactgtggaaggactggaaccttatgccttatttaatctttctgtcactccttatacctactggggaaagggccccaaaacatctctgtcacttcgagcacctgaaacagttccatcagcaccagagaaccccagaatatttatattaccaagtggaaaatgctgcaacaagaatgaagttgtggtggaatttaggtggaacaaacctaagcatgaaaatggggtgttaacaaaatttgaaattttctacaatatatccaatcaaagtattacaaacaaaacatgtgaagactggattgctgtcaatgtcactccctcagtgatgtcttttcaacttgaaggcatgagtcccagatgctttattgccttccaggttagggcctttacatctaaggggccaggaccatatgctgacgttgtaaagtctacaacatcagaaatcaacccatttcctcacctcataactcttcttggtaacaagatagtttttttagatatggatcaaaatcaagttgtgtggacgttttcagcagaaagagttatcagtgccgtttgctacacagctgataatgagatgggatattatgctgaaggggactcactctttcttctgcacttgcacaatcgctctagctctgagcttttccaagattcactggtttttgatatcacagttattacaattgactggatttcaaggcacctctactttgcactgaaagaatcacaaaatggaatgcaagtatttgatgttgatcttgaacacaaggtgaaatatcccagagaggtgaagattcacaataggaattcaacaataatttctttttctgtatatcctcttttaagtcgcttgtattggacagaagtttccaattttggctaccagatgttctactacagtattatcagtcacaccttgcaccgaattctgcaacccacagctacaaaccaacaaaacaaaaggaatcaatgttcttgtaatgtgactgaatttgagttaagtggagcaatggctattgatacctctaacctagagaaaccattgatatactttgccaaagcacaagagatctgggcaatggatctggaaggctgtcagtgttggagagttatcacagtacctgctatgctcgcaggaaaaacccttgttagcttaactgtggatggagatcttatatactggatcatcacagcaaaggacagcacacagatttatcaggcaaagaaaggaaatggggccatcgtttcccaggtgaaggccctaaggagtaggcatatcttggcttacagttcagttatgcagccttttccagataaagcgtttctgtctctagcttcagacactgtggaaccaactatacttaatgccactaacactagcctcacaatcagattacctctggccaagacaaacctcacatggtatggcatcaccagccctactccaacatacctggtttattatgcagaagttaatgacaggaaaaacagctctgacttgaaatatagaattctggaatttcaggacagtatagctcttattgaagatttacaaccattttcaacatacatgatacagatagctgtaaaaaattattattcagatcctttggaacatttaccaccaggaaaagagatttggggaaaaactaaaaatggagtaccagaggcagtgcagctcattaatacaactgtgcggtcagacaccagcctcattatatcttggagagaatctcacaagccaaatggacctaaagaatcagtccgttatcagttggcaatctcacacctggccctaattcctgaaactcctctaagacaaagtgaatttccaaatggaaggctcactctccttgttactagactgtctggtggaaatatttatgtgttaaaggttcttgcctgccactctgaggaaatgtggtgtacagagagtcatcctgtcactgtggaaatgtttaacacaccagagaaaccttattccttggttccagagaacactagtttgcaatttaattggaaggctccattgaatgttaacctcatcagattttgggttgagctacagaagtggaaatacaatgagttttaccatgttaaaacttcatgcagccaaggtcctgcttatgtctgtaatatcacaaatctacaaccttatacttcatataatgtcagagtagtggtggtttataagacgggagaaaatagcacctcacttccagaaagctttaagacaaaagctggagtcccaaataaaccaggcattcccaaattactagaagggagtaaaaattcaatacagtgggagaaagctgaagataatggatgtagaattacatactatatccttgagataagaaagagcacttcaaataatttacagaaccagaatttaaggtggaagatgacatttaatggatcctgcagtagtgtttgcacatggaagtccaaaaacctgaaaggaatatttcagttcagagtagtagctgcaaataatctagggtttggtgaatatagtggaatcagtgagaatattatattagttggagatgatttttggataccagaaacaagtttcatacttactattatagttggaatatttctggttgttacaatcccactgacctttgtctggcatagaagattaaagaatcaaaaaagtgccaaggaaggggtgacagtgcttataaacgaagacaaagagttggctgagctgcgaggtctggcagccggagtaggcctggctaatgcctgctatgcaatacatactcttccaacccaagaggagattgaaaatcttcctgccttccctcgggaaaaactgactctgcgtctcttgctgggaagtggagcctttggagaagtgtatgaaggaacagcagtggacatcttaggagttggaagtggagaaatcaaagtagcagtgaagactttgaagaagggttccacagaccaggagaagattgaattcctgaaggaggcacatctgatgagcaaatttaatcatcccaacattctgaagcagcttggagtttgtctgctgaatgaaccccaatacattatcctggaactgatggagggaggagaccttcttacttatttgcgtaaagcccggatggcaacgttttatggtcctttactcaccttggttgaccttgtagacctgtgtgtagatatttcaaaaggctgtgtctacttggaacggatgcatttcattcacagggatctggcagctagaaattgccttgtttccgtgaaagactataccagtccacggatagtgaagattggagactttggactcgccagagacatctataaaaatgattactatagaaagagaggggaaggcctgctcccagttcggtggatggctccagaaagtttgatggatggaatcttcactactcaatctgatgtatggtcttttggaattctgatttgggagattttaactcttggtcatcagccttatccagctcattccaaccttgatgtgttaaactatgtgcaaacaggagggagactggagccaccaagaaattgtcctgatgatctgtggaatttaatgacccagtgctgggctcaagaacccgaccaaagacctacttttcatagaattcaggaccaacttcagttattcagaaattttttcttaaatagcatttataagtccagagatgaagcaaacaacagtggagtcataaatgaaagctttgaaggtgaagatggcgatgtgatttgtttgaattcagatgacattatgccagttgctttaatggaaacgaagaaccgagaagggttaaactatatggtacttgctacagaatgtggccaaggtgaagaaaagtctgagggtcctctaggctcccaggaatctgaatcttgtggtctgaggaaagaagagaaggaaccacatgcagacaaagatttctgccaagaaaaacaagtggcttactgcccttctggcaagcctgaaggcctgaactatgcctgtctcactcacagtggatatggagatgggtctgattaatagcgttgtttgggaaatagagagttgagataaacactctcattcagtagttactgaaagaaaactctgctagaatgataaatgtcatggtggtctataactccaaataaacaatgcaacgttcc

SEQ ID NO: 454 - DNA, 1487 bp, Mus musculus
agctggtgctgataacagcggaatcccctgtctacctctctccttggtcctggaatagtgctaccgatcactaagtagccctaagacataataaaccttcaactgctcagtagtttttcttatgaaagtcaagtaaaaggacgtaagcaaaaaaaaattattttttttttgcgtgaaggattccaaaaataaaattctctggggactgagaagaaaaaaaaaaaaaaaacgaaaatgccagctgatataatggagaaaaattcctcctccccggtggctgctaccccagccagtgtcaacacgacaccggacaaaccaaagacggcctctgagcacagaaagtcatcaaagcctatcatggagaagaggcgaagggcaagaataaatgaaagtctaagccaactgaaaacactgattttggatgcacttaagaaagatagctcccggcattccaagctagagaaggcagacattctggaaatgactgtgaagcacctccggaacctgcagcgggcgcagatgaccgccgcgctcagcacagacccgagcgtgttggggaaataccgcgccggcttcagcgagtgcatgaacgaggtgacccgcttcctgtccacgtgtgagggcgttaacaccgaggtgcgcactcggctgctgggccacctggccaactgcatgacccagatcaacgccatgacctaccccgggcaggcgcaccccgccttgcaggcgccgccgccgccgcccccgtcaggacctgccggtccccagcacgcgccattcgcgccgccgccgccgccgcttgtgcccatccccgggggcgcggcgccccctcccggcagcgcaccctgcaagttgggcagccaggctggagaggctgccaaggtttttggcggcttccaagtggtgccggctcctgacggccaatttgcctttctcatccccaacggggccttcgctcacagcggcccggtcatcccggtctacaccagcaacagtgggacctcggtgggtcctaacgcagtgtcaccttccagtggctcctcgctcacttcggactccatgtggagaccgtggcggaactgagagcctcaggccactgctacccgtaaagtccctagcccacctctctcttctgacggacactaaaaacgaacttggattttaggagagacttttataatttggtggttattttgttgctttttttaattctaaaaagttactttttgtagagagctgtattaagtgactgaccatgcactgcatttgtatatattttatatgttcatattggattgcgcctttgtattataaaagttgagatgacatttcgttttttacacgagatttctttttttatgtgatgccaaagatgtttgaaaatgctcttaaaatatcttcctttggggaagtttatttgagaaaatataataaaagagtgaaggcttttaaaaaaaaaaaaaaaaaaaaaaaaaaaaaaaaaaaaa

SEQ ID NO: 455 - DNA, 76 bp, Homo sapiens
gctgggctctcaaagtggttgtgaaatgcatttccgctttgcgcggcatatcacagccagctttgatgagcttagc

SEQ ID NO: 456 - DNA, 110 bp, Homo sapiens
ttggatgttggcctagttctgtgtggaagactagtgattttgttgtttttagataactaaatcgacaacaaatcacagtctgccatatggcacaggccatgcctctacag

SEQ ID NO: 457 - DNA, 87 bp, Homo sapiens
aaggacatctgttcacatcttaccgggcagcattagatcctttttataactctaatactgtcaggtaaagatgtcgtccgtgtcctt

SEQ ID NO: 458 - DNA, 75 bp, Homo sapiens
gcacttgtcaagaactttctctgtgacccgcgtgtacttaaaagccgcatcacagtctgagttcttgctgagtgc

SEQ ID NO: 459 - DNA, 68 bp, Homo sapiens
ccatgtcgttaaaatgtttgtgaacttatgtattcacaatcatatcacagccattttgacgagtttgg

SEQ ID NO: 460 - DNA, 63 bp, Homo sapiens
tgtgggagcgagacggggactcactgtgcttattaaatagtcagtctttttctctctcctata

SEQ ID NO: 461 - DNA, 84 bp, Homo sapiens
gtcagaataatgtcaaagtgcttacagtgcaggtagtgatatgtgcatctactgcagtgaaggcacttgtagcattatggtgac

SEQ ID NO: 462 - DNA, 71 bp, Homo sapiens
tgttctaaggtgcatctagtgcagatagtgaagtagattagcatctactgccctaagtgctccttctggca

SEQ ID NO: 463 - DNA, 82 bp, Homo sapiens
gcagtcctctgttagttttgcatagttgcactacaagaagaatgtagttgtgcaaatctatgcaaaactgatggtggcctgc

SEQ ID NO: 464 - DNA, 71 bp, Homo sapiens
gtagcactaaagtgcttatagtgcaggtagtgtttagttatctactgcattatgagcacttaaagtactgc

SEQ ID NO: 465 - DNA, 85 bp, Homo sapiens
ggctgagccgcagtagttcttcagtggcaagctttatgtcctgacccagctaaagctgccagttgaagaactgttgccctctgcc

SEQ ID NO: 466 - DNA, 97 bp, Homo sapiens
ctcaggtgctctggctgcttgggttcctggcatgctgatttgtgacttaagattaaaatcacattgccagggattaccacgcaaccacgaccttggc

SEQ ID NO: 467 - DNA, 73 bp, Homo sapiens
ctctgcctcccgtgcctactgagctgaaacacagttggtttgtgtacactggctcagttcagcaggaacaggg

SEQ ID NO: 468 - DNA, 84 bp, Homo sapiens
ggccagtgttgagaggcggagacttgggcaattgctggacgctgccctgggcattgcacttgtctcggtctgacagtgccggcc

SEQ ID NO: 469 - DNA, 78 bp, Homo sapiens
ctgaggagcagggcttagctgcttgtgagcagggtccacaccaagtcgtgttcacagtggctaagttccgccccccag

SEQ ID NO: 470 - DNA, 86 bp, Homo sapiens
ggtccttgccctcaaggagctcacagtctattgagttacctttctgactttcccactagattgtgagctcctggagggcaggcact

SEQ ID NO: 471 - DNA, 71 bp, Homo sapiens
ggagaggaggcaagatgctggcatagctgttgaactgggaacctgctatgccaacatattgccatctttcc

SEQ ID NO: 472 - DNA, 70 bp, Homo sapiens
ggagatattgcacattactaagttgcatgttgtcacggcctcaatgcaatttagtgtgtgtgatattttc

SEQ ID NO: 473 - DNA, 77 bp, Homo sapiens
agtctagttactaggcagtgtagttagctgattgctaatagtaccaatcactaaccacacggccaggtaaaaagatt

SEQ ID NO: 474 - DNA, 81 bp, Homo sapiens
aacacagtgggcactcaataaatgtctgttgaattgaaatgcgttacattcaacgggtatttattgagcacccactctgtg

SEQ ID NO: 475 - DNA, 80 bp, Homo sapiens
gtgagcgactgtaaacatcctcgactggaagctgtgaagccacagatgggctttcagtcggatgtttgcagctgcctact

SEQ ID NO: 476 - DNA, 81 bp, Homo sapiens
cccattggcataaacccgtagatccgatcttgtggtgaagtggaccgcacaagctcgcttctatgggtctgtgtcagtgtg

SEQ ID NO: 477 - DNA, 80 bp, Homo sapiens
cctgttgccacaaacccgtagatccgaacttgtggtattagtccgcacaagcttgtatctataggtatgtgtctgttagg

SEQ ID NO: 478 - DNA, 75 bp, Homo sapiens
tgccctggctcagttatcacagtgctgatgctgtctattctaaaggtacagtactgtgataactgaaggatggca

SEQ ID NO: 479 - DNA, 78 bp, Homo sapiens
aaatgtcagacagcccatcgactggtgttgccatgagattcaacagtcaacatcagtctgataagctacccgacaagg

SEQ ID NO: 480 - DNA, 81 bp, Homo sapiens
tgtgcatcgtggtcaaatgctcagactcctgtggtggctgctcatgcaccacggatgtttgagcatgtgctacggtgtcta

SEQ ID NO: 481 - DNA, 81 bp, Homo sapiens
ccttggccatgtaaaagtgcttacagtgcaggtagctttttgagatctactgcaatgtaagcacttcttacattaccatgg

SEQ ID NO: 482 - DNA, 48 bp, Homo sapiens
ctggtcgagtcggcctgcgccacaccaagcgcaggccgactcgaccag

SEQ ID NO: 483 - DNA, 54 bp, Homo sapiens
tgtgcaaatctatgcaaaactgtcacaccaaacagttttgcatagatttgcaca

SEQ ID NO: 484 - DNA, 46 bp, Homo sapiens
ggtcctgacatccacggaacacaccaattccgtggatgtcaggacc

SEQ ID NO: 485 - DNA, 60 bp, Homo sapiens
ttgatcctggctcaggacgaacgctgcacaccaacagcgttcgtcctgagccaggatcaa

SEQ ID NO: 486 - DNA, 44 bp, Homo sapiens
attgccagggattaccatcacaccaaatggtaatccctggcaat

SEQ ID NO: 487 - DNA, 85 bp, Homo sapiens
ccttagcagagctgtggagtgtgacaatggtgtttgtgtctaaactatcaaacgccattatcacactaaatagctactgctaggc

SEQ ID NO: 488 - DNA, 97 bp, Homo sapiens
tgtgatcactgtctccagcctgctgaagctcagagggctctgattcagaaagatcatcggatccgtctgagcttggctggtcggaagtctcatcatc

SEQ ID NO: 489 - DNA, 89 bp, Homo sapiens
tgctgctggccagagctcttttcacattgtgctactgtctgcacctgtcactagcagtgcaatgttaaaagggcattggccgtgtagtg

SEQ ID NO: 490 - DNA, 88 bp, Homo sapiens
acaatgctttgctagagctggtaaaatggaaccaaatcgcctcttcaatggatttggtccccttcaaccagctgtagctatgcattga

SEQ ID NO: 491 - DNA, 95 bp, Homo sapiens
cggccggccctgggtccatcttccagtacagtgttggatggtctaattgtgaagctcctaacactgtctggtaaagatggctcccgggtgggttc

SEQ ID NO: 492 - DNA, 86 bp, Homo sapiens
tggggccctggctgggatatcatcatatactgtaagtttgcgatgagacactacagtatagatgatgtactagtccgggcaccccc

SEQ ID NO: 493 - DNA, 72 bp, Homo sapiens
aatctaaagacaacatttctgcacacacaccagactatggaagccagtgtgtggaaatgcttctgctagatt

SEQ ID NO: 494 - DNA, 68 bp, Homo sapiens
gaggcaaagttctgagacactccgactctgagtatgatagaagtcagtgcactacagaactttgtctc

SEQ ID NO: 495 - DNA, 66 bp, Homo sapiens
gaagataggttatccgtgttgccttcgctttatttgtgacgaatcatacacggttgacctattttt

SEQ ID NO: 496 - DNA, 66 bp, Homo sapiens; identical to SEQ ID NO: 495

SEQ ID NO: 497 - DNA, 110 bp, Homo sapiens
ccagaggacacctccactccgtctacccagtgtttagactatctgttcaggactcccaaattgtacagtagtctgcacattggttaggctgggctgggttagaccctcgg

SEQ ID NO: 498 - DNA, 54 bp, Homo sapiens
tggcagtgtcttagctggttgttcacaccaaaacaaccagctaagacactgcca

SEQ ID NO: 499 - DNA, 52 bp, Homo sapiens
tatggcactggtagaattcactcacaccaaagtgaattctaccagtgccata

SEQ ID NO: 500 - DNA, 54 bp, Homo sapiens
caagtcactagtggttccgtttacacaccaataaacggaaccactagtgacttg

SEQ ID NO: 501 - DNA, 52 bp, Homo sapiens
ggttgataggtcgggggtgtaacacaccaattacacccccgacctatcaacc

SEQ ID NO: 502 - DNA, 56 bp, Homo sapiens
atttcaggtgaagtttcaagagtccacaccaagactcttgaaacttcacctgaaat

SEQ ID NO: 503 - DNA, 110 bp, Homo sapiens
gagctgcttgcctccccccgtttttggcaatggtagaactcacactggtgaggtaacaggatccggtggttctagacttgccaactatggggcgaggactcagccggcac

SEQ ID NO: 504 - DNA, 110 bp, Homo sapiens
ccgcagagtgtgactcctgttctgtgtatggcactggtagaattcactgtgaacagtctcagtcagtgaattaccgaagggccataaacagagcagagacagatccacga

SEQ ID NO: 505 - DNA, 84 bp, Homo sapiens
ccagtcacgtccccttatcacttttccagcccagctttgtgactgtaagtgttggacggagaactgataagggtaggtgattga

SEQ ID NO: 506 - DNA, 82 bp, Homo sapiens
agggggcgagggattggagagaaaggcagttcctgatggtcccctccccaggggctggctttcctctggtccttccctccca

SEQ ID NO: 507 - DNA, 86 bp, Homo sapiens
tgcttgtaactttccaaagaattctccttttgggctttctggttttattttaagcccaaaggtgaattttttgggaagtttgagct

SEQ ID NO: 508 - DNA, 109 bp, Homo sapiens
ggtcgggctcaccatgacacagtgtgagacctcgggctacaacacaggacccgggcgctgctctgacccctcgtgtcttgtgttgcagccggagggacgcaggtccgca

SEQ ID NO: 509 - DNA, 68 bp, Homo sapiens
cctcgctgcctactgagctgatatcagttctcatttcacacactggctcagttcagcaggaacaggag

SEQ ID NO: 510 - DNA, 92 bp, Homo sapiens
cggctggacagcgggcaacggaatcccaaaagcagctgttgtctccagagcattccagctgcgcttggatttcgtcccctgctctcctgcct

SEQ ID NO: 511 - DNA, 88 bp, Homo sapiens
cgaggatgggagctgagggctgggtctttgcgggcgagatgagggtgtcggatcaactggcctacaaagtcccagttctcggcccccg

SEQ ID NO: 512 - DNA, 87 bp, Homo sapiens
agcttccctggctctagcagcacagaaatattggcacagggaagcgagtctgccaatattggctgtgctgctccaggcagggtggtg

SEQ ID NO: 513 - DNA, 70 bp, Homo sapiens
gtgaattaggtagtttcatgttgttgggcctgggtttctgaacacaacaacattaaaccacccgattcac

SEQ ID NO: 514 - DNA, 75 bp, Homo sapiens
ggctgtgccgggtagagagggcagtgggaggtaagagctcttcacccttcaccaccttctccacccagcatggcc

SEQ ID NO: 515 - DNA, 66 bp, Homo sapiens
taccttactcagtaaggcattgttcttctatattaataaatgaacagtgcctttctgtgtagggta

SEQ ID NO: 516 - DNA, 110 bp, Homo sapiens
gtgttggggactcgcgcgctgggtccagtggttcttaacagttcaacagttctgtagcgcaattgtgaaatgtttaggaccactagacccggcgggcgcggcgacagcga

SEQ ID NO: 517 - DNA, 110 bp, Homo sapiens
aaagatcctcagacaatccatgtgcttctcttgtccttcattccaccggagtctgtctcatacccaaccagatttcagtggagtgaagttcaggaggcatggagctgaca

SEQ ID NO: 518 - DNA, 81 bp, Homo sapiens
gggctttcaagtcactagtggttccgtttagtagatgattgtgcattgtttcaaaatggtgccctagtgactacaaagccc

1. A method for modulating expression of a target gene in a cell, the method comprising introducing into the cell a polynucleotide that forms a duplex region with an mRNA transcribed from said target gene, wherein said duplex region comprises a mammalian mRNA target region.

2. The method of claim 1, wherein the miRNA target region comprises a sequence having at least about 70% identity to a polynucleotide selected from SEQ ID Nos: 5-11, 13, and 121-290.

3. The method of claim 1, wherein the polynucleotide is an miRNA or a precursor thereof, or a vector encoding said miRNA or a precursor thereof.

4. The method of claim 3, wherein the miRNA comprises a sequence having at least about 70% identity to a polynucleotide selected from SEQ ID Nos: 1, 3, 12, and 14-120.

5. The method of claim 4, wherein the miRNA or precursor thereof is selected from the group consisting of: miR-1, miR-2-1, miR-5, miR-7, miR-8, miR-11, miR-12, miR-13, miR-14, miR-15, miR-16, miR-17, miR-18, miR-19, miR-20, miR-21, miR-22, miR-23, miR-24, miR-25, miR-26, miR-27, miR-28, miR-29, miR-30, miR-31, miR-32, miR-33, miR-34, miR-92, miR-93, miR-94, miR-95, miR-96, miR-97, miR-98, miR-99, miR-100, miR101, miR-103, miR-104, miR-105, miR-106, miR-107, miR-109, miR-110, miR-111, miR-112, miR-113, miR-114, miR-116, miR-119, miR-122, miR-125, miR-126, miR-127, miR-129, miR-130, miR-132, miR-133, miR-134, miR-136, miR-138, miR-140, miR-141, miR-144, miR-145, miR-146, miR-147, miR-148, miR-149, miR-150, miR-151, miR-153, miR-154, miR-157, miR-158, miR-160, miR-162, miR-164, miR-172, miR-173, miR-174, miR-175, miR-176, miR-177, miR-178, miR-179, miR-180, miR-182, miR-183, miR-184, miR-185, miR-186, miR-187, miR-188, miR-189, miR-191, miR-192, miR-193, miR-195, miR-196, miR-197, miR-199, miR-201, miR-203, miR-205, and miR-224, or a precursor thereof.

6. The method of claim 4, wherein the mRNA comprises a sequence selected from the group consisting of SEQ ID Nos: 1, 3, 12, and 14-120.

7. The method of claim 1, wherein the target gene is selected from the group consisting of: dbl proto-oncogene; transforming growth factor beta 1; transforming growth factor alpha; v-myb myeloblastosis viral oncogene homolog; c-cbl proto-oncogene; snoI; activin beta E subunit; myogenic factor 5; fibroblast growth factor 9; RON encoding a tyrosine kinase; E3 ubiquitin ligase SMURF1; jagged 2; jun-B encoding the JUN-B protein; methyl-CpG binding domain protein 4; ZIP kinase; endomucin; ICE-protease activating factor; hairy and enhancer of split 1; transforming growth factor beta 3; enaptin mRNA; AMP deaminase; interleukin 1 alpha; E2F transcription factor 6; laminin alpha; polymerase (DNA-directed) alpha; leukocyte tyrosine kinase; homeo box D1; laminin gamma; tumor necrosis factor receptor superfamily member 1A; villin 2; frizzled homolog 5; ATP-dependent chromatin remodelling protein; MSX2 mRNA for transcription factor; adipose differentiation-related protein; myogenic factor 4; SRY (Sex determining Region Y)-box 5; Notch homolog 1; Human tyrosine kinase-type receptor; polymerase (DNA directed) theta; cAMP responsive element binding protein 3; timeless homolog; RAD52 homolog; toll-like receptor 4; SRY (Sex determining Region Y)-box 9; homeo box A5; cell division cycle 42 GTP binding protein; desmuslin; TFIIIC Box B-binding subunit; profilin 2; c-fms proto-oncogene; delta-like 1; fatty-acid-Coenzyme A ligase long-chain 5; discs large homolog-associated protein 2; TFIIH gene for transcription factor II H; RNA polymerase III subunit RPC; RecQ protein-like 5; METH2 protein; MOST2 protein; SRY (Sex determining Region Y)-box 7; integrin beta 1 subunit; desmin; protection of telomeres 1; H2.0-like homeo box 1; GABA transport protein; v-myc myelocytomatosis viral related oncogene neuroblastoma derived; BAG-family molecular chaperone regulator-S; Human placental bone morphogenic protein; retinoblastoma-associated factor 600; ALK-4; tolloid-like 2; RIGB; Human DNA repair helicase; T-box 22; BRCA1 associated protein 1; Sp3 transcription factor; TEF-1 gene; forkhead box A3; ets family transcription factor ELF2A; microtubule-associated protein 1A; myosin 5B; NEDD4-like ubiquitin ligase 1; Mint1 mRNA; PARX protein; epidermal growth factor receptor; matrix metalloproteinase 3; VE-cadherin; microtubule-associated protein 2; TAF7 RNA polymerase II TATA box binding protein (TBP)-associated factor; mitochondrial elongation factor G2; eyes absent homolog; paired box gene 3; synaptotagmin 1; histone deacetylase 5; homolog of Drosophila headcase; homeo box B8; fyn-related kinase; TGF-beta/activin signal transducer FAST-1 p; La autoantigen; mutL homolog 1; E74-like factor 3; B-myb gene; a-myb mRNA; jagged 1; homeobox protein SHOTb; death-associated protein kinase 3; RAD51 homolog (RecA homolog); methyl-CpG binding endonuclease; HUS1 checkpoint homolog; HES 1 protein; caldesmon 1; VENT-like homeobox 2; early growth response 2 protein; Notch3; lin-28 homolog; PML-3; c-myc binding protein; transducer of ERBB2 1; neuron navigator 3; multiple asters 1; headcase homolog; microtubule-associated protein 6; methyl-CpG binding domain protein 1; EphA5; polymerase (RNA) III (DNA directed); neuro-oncological ventral antigen 1; activating transcription factor 1; interphotoreceptor retinoid-binding protein; E2F transcription factor 3; mesoderm specific transcript homolog; bone morphogenetic protein 3; EphA3; methyl-CpG binding domain protein 5; fibroblast growth factor 12; RNA helicase A; matrix metalloproteinase 26; crossveinless-2; cadherin 5 type 2 VE-cadherin; eukaryotic translation initiation factor 4A; TWEAK; fork head domain protein; HOXB7 gene; Pax-3; homeobox protein SHOTa; inhibitor of growth family member 1; v-ets erythroblastosis virus E26 oncogene like; reticulon 4; NOD2 protein; interleukin 6 receptor; PML-2 mRNA; discs large homolog 1; Yes-associated protein 1; CD 14 antigen; negative differentiation regulator; CREB binding protein; v-ski sarcoma viral oncogene homolog; sidekick homolog 1; bone morphogenetic protein receptor type II; programmed cell death 10; cyclin H; nuclear protein double minute 1; BCL2/adenovirus E1B 19 kDa interacting protein 2; karyopherin beta 2; and v-ros UR2 sarcoma virus oncogene homolog 1.

8. The method of claim 7, wherein the mRNA transcribed from said target gene comprises a polynucleotide sequence having at least 70% identity to a polynucleotide selected from SEQ ID Nos: Nos: 5-11, 13, and 121-290.

9. The method of claim 7, wherein said target gene comprises a polynucleotide sequence that hybridizes under moderately stringent conditions with a polynucleotide sequence selected from SEQ ID Nos: 291-454.

10. A method for modulating expression of a mammalian target gene in a cell, the method comprising introducing into the cell an siRNA that forms a duplex region with an mRNA, or precursor thereof, wherein an mRNA transcribed from said target gene comprises an mRNA target region.

11. The method of claim 10, wherein the siRNA forms a duplex region with an mRNA, thereby inhibiting the mRNA from forming a second duplex region with mRNA transcribed from said target gene.

12. The method of claim 10, wherein the siRNA forms a duplex region with an mRNA precursor, thereby inhibiting the mRNA precursor from converting to mRNA.

13. The method of claim 10, wherein the mRNA target region comprises a sequence having at least about 70% identity to a polynucleotide selected from SEQ ID Nos: 5-11, 13, and 121-290.

14. The method of claim 10, wherein the mRNA or precursor thereof comprises a sequence having at least about 70% identity to a polynucleotide selected from SEQ ID Nos: 1, 3, 12, and 14-120.

15. The method of claim 14, wherein the mRNA or precursor thereof is selected from the group consisting of: miR-1, miR-2-1, miR-5, miR-7, miR-8, miR-11, miR-12, miR-13, miR-14, miR-15, miR-16, miR-17, miR-18, miR-19, miR-20, miR-21, miR-22, miR-23, miR-24, miR-25, miR-26, miR-27, miR-28, miR-29, miR-30, miR-31, miR-32, miR-33, miR-34, miR-92, miR-93, miR-94, miR-95, miR-96, miR-97, miR-98, miR-99, miR-100, miR101, miR-103, miR-104, miR-105, miR-106, miR-107, miR-109, miR-110, miR-111, miR-112, miR-113, miR-114, miR-116, miR-119, miR-122, miR-125, miR-126, miR-127, miR-129, miR-130, miR-132, miR-133, miR-134, miR-136, miR-138, miR-140, miR-141, miR-144, miR-145, miR-146, miR-147, miR-148, miR-149, miR-150, miR-151, miR-153, miR-154, miR-157, miR-158, miR-160, miR-162, miR-164, miR-172, miR-173, miR-174, miR-175, miR-176, miR-177, miR-178, miR-179, miR-180, miR-182, miR-183, miR-184, miR-185, miR-186, miR-187, miR-188, miR-189, miR-191, miR-192, miR-193, miR-195, miR-196, miR-197, miR-199, miR-201, miR-203, miR-205, and miR-224, or a precursor thereof.

16. The method of claim 14, wherein the mRNA or precursor thereof comprises a sequence selected from the group consisting of SEQ ID Nos: 1, 3, 12, and 14-120.

17. The method of claim 10, wherein the target gene is selected from the group consisting of: dbl proto-oncogene; transforming growth factor beta 1; transforming growth factor alpha; v-myb myeloblastosis viral oncogene homolog; c-cbl proto-oncogene; snoI; activin beta E subunit; myogenic factor 5; fibroblast growth factor 9; RON encoding a tyrosine kinase; E3 ubiquitin ligase SMURF1; jagged 2; jun-B encoding the JUN-B protein; methyl-CpG binding domain protein 4; ZIP kinase; endomucin; ICE-protease activating factor; hairy and enhancer of split 1; transforming growth factor beta 3; enaptin mRNA; AMP deaminase; interleukin 1 alpha; E2F transcription factor 6; laminin alpha; polymerase (DNA-directed) alpha; leukocyte tyrosine kinase; homeo box D1; laminin gamma; tumor necrosis factor receptor superfamily member 1A; villin 2; frizzled homolog 5; ATP-dependent chromatin remodelling protein; MSX2 mRNA for transcription factor; adipose differentiation-related protein; myogenic factor 4; SRY (Sex determining Region Y)-box 5; Notch homolog 1; Human tyrosine kinase-type receptor; polymerase (DNA directed) theta; cAMP responsive element binding protein 3; timeless homolog; RAD52 homolog; toll-like receptor 4; SRY (Sex determining Region Y)-box 9; homeo box A5; cell division cycle 42 GTP binding protein; desmuslin; TFIIIC Box B-binding subunit; profilin 2; c-fms proto-oncogene; delta-like 1; fatty-acid-Coenzyme A ligase long-chain 5; discs large homolog-associated protein 2; TFIIH gene for transcription factor II H; RNA polymerase III subunit RPC; RecQ protein-like 5; METH2 protein; MOST2 protein; SRY (Sex determining Region Y)-box 7; integrin beta 1 subunit; desmin; protection of telomeres 1; H2.0-like homeo box 1; GABA transport protein; v-myc myelocytomatosis viral related oncogene neuroblastoma derived; BAG-family molecular chaperone regulator-S; Human placental bone morphogenic protein; retinoblastoma-associated factor 600; ALK-4; tolloid-like 2; RIGB; Human DNA repair helicase; T-box 22; BRCA1 associated protein 1; Sp3 transcription factor; TEF-1 gene; forkhead box A3; ets family transcription factor ELF2A; microtubule-associated protein 1A; myosin 5B; NEDD4-like ubiquitin ligase 1; Mint1 mRNA; PARX protein; epidermal growth factor receptor; matrix metalloproteinase 3; VE-cadherin; microtubule-associated protein 2; TAF7 RNA polymerase II TATA box binding protein (TBP)-associated factor; mitochondrial elongation factor G2; eyes absent homolog; paired box gene 3; synaptotagmin 1; histone deacetylase 5; homolog of Drosophila headcase; homeo box B8; fyn-related kinase; TGF-beta/activin signal transducer FAST-1p; La autoantigen; mutL homolog 1; E74-like factor 3; B-myb gene; a-myb mRNA; jagged 1; homeobox protein SHOTb; death-associated protein kinase 3; RAD51 homolog (RecA homolog); methyl-CpG binding endonuclease; HUS1 checkpoint homolog; HES1 protein; caldesmon 1; VENT-like homeobox 2; early growth response 2 protein; Notch3; lin-28 homolog; PML-3; c-myc binding protein; transducer of ERBB2 1; neuron navigator 3; multiple asters 1; headcase homolog; microtubule-associated protein 6; methyl-CpG binding domain protein 1; EphA5; polymerase (RNA) III (DNA directed); neuro-oncological ventral antigen 1; activating transcription factor 1; interphotoreceptor retinoid-binding protein; E2F transcription factor 3; mesoderm specific transcript homolog; bone morphogenetic protein 3; EphA3; methyl-CpG binding domain protein 5; fibroblast growth factor 12; RNA helicase A; matrix metalloproteinase 26; crossveinless-2; cadherin 5 type 2 VE-cadherin; eukaryotic translation initiation factor 4A; TWEAK; fork head domain protein; HOXB7 gene; Pax-3; homeobox protein SHOTa; inhibitor of growth family member 1; v-ets erythroblastosis virus E26 oncogene like; reticulon 4; NOD2 protein; interleukin 6 receptor; PML-2 mRNA; discs large homolog 1; Yes-associated protein 1; CD14 antigen; negative differentiation regulator; CREB binding protein; v-ski sarcoma viral oncogene homolog; sidekick homolog 1; bone morphogenetic protein receptor type II; programmed cell death 10; cyclin H; nuclear protein double minute 1; BCL2/adenovirus E1B 19 kDa interacting protein 2; karyopherin beta 2; and v-ros UR2 sarcoma virus oncogene homolog 1.

18. The method of claim 17, wherein the mRNA transcribed from said target gene comprises a polynucleotide sequence having at least about 70% identity to a polynucleotide selected from SEQ ID Nos: 1, 3, 12, and 14-120.

19. The method of claim 17, wherein said target gene comprises a polynucleotide sequence that hybridizes under moderately stringent conditions with a polynucleotide sequence selected from SEQ ID Nos: 291-454.

20. The method of claim 1, further comprising measuring expression of said target gene.

21. The method of claim 1, wherein the method modulates ontogenesis, function, differentiation and/or viability of a mammalian cell.

22. A method for controlling ontogenesis of mammal, function of mammalian cell, differentiation of mammalian cell or viability of mammalian cell in the post-transcriptional phase, the method comprising introducing into the cell a mRNA or a siRNA silencing precursor to the the mRNA.

23. The method defined in claim 10, wherein the siRNA binds to a loop in stem-loop structure of the mRNA or precursor thereof.

24. The method of claim 10, wherein the siRNA targets mRNA and has a sequence with at least about 70% identity to the sequence disclosed in SEQ ID No: 2.

25. The method of claim 10, wherein the method controls differentiation of nerve cell by regulating expression of hairy and enhancer of split 1.

26. A plasmid vector comprising a promoter and a polynucleotide sequence expressing mRNA or a precursor to the miRNA.

27. A plasmid vector comprising from a promoter and a nucleotide sequence expressing siRNA silencing precursor to miRNA.

28. The plasmid vector of claim 26, wherein the miRNA is capable of forming a duplex region with an mRNA transcribed from a mammalian target gene.

29. The plasmid vector defined in claim 27, wherein the promoter is tRNA^{(val)} promoter.

30. The plasmid vector defined in claim 27, wherein the promoter is selected from the group consisting of tRNA^{(val)} promoter, U6 promoter, H1 promoter and Pol II promoter, such as CMV and SV40 promoter.

31. A method for controlling ontogenesis of mammal, function of mammalian cell, differentiation of mammalian cell or viability of mammalian cell in the post-transcriptional phase introducing into the cell the plasmid vector defined in claim 27.

32. A method for treating cancer, immune disease, nerve disorder or inflammatory disease, the method comprising introducing into a cell an miRNA, a siRNA silencing precursor to the mRNA or the plasmid vector defined in claim 27.

33. The method defined in claim 32, wherein the nerve disorder is selected from amyotrophic lateral sclerosis (ALS), Parkinson disease or Alzheimer disease.

34. A method for screening pharmaceuticals using a miRNA, a siRNA silencing precursor to the miRNA or the plasmid vector defined defined in claim 27.

35. The method defined in claim 34, wherein the target mRNA is derived from a recombinant gene having a sequence of the target region of the miRNA.

36. A method for gene function analysis using a miRNA, a siRNA silencing precursor to the miRNA or the plasmid vector defined in claim 27.

37. A method for regulation of cell differentiation to muscle cell, bone cell or myocardial cell, identified by the gene function analysis defined in claim 36.

38. A method for preservation or maintenance of anaplastic cell, introducing into cell a substance suppressing expression of miR-23.

39. A method for regulating ratio of gene expression, by producing recombinant of selected gene and target sequence of miR-23 of Hes1, and designing miR-23 sequence 50 to 90% complementary to the target sequence.

40. A method for suppressing gene expression, introducing into cell a siRNA inducing decomposition of mRNA and a miRNA.

41. The method defined in claim 40, wherein the miRNA is miR-23.
